(19) United States
(12) Patent Application Publication
(10) Pub. No.: US 2019/0128884 A1
(43) Pub. Date: May 2, 2019

(54) MARKER SEQUENCES FOR MANAGING THE THERAPY OF RHEUMATOID ARTHRITIS PATIENTS

(71) Applicant: PROTAGEN AG, Dortmund (DE)

(72) Inventors: Petra BUDDE, Dortmund (DE); Angelika LÜKING, Bochum (DE); Peter SCHULZ-KNAPPE, Hemmingen (DE); Hans-Dieter ZUCHT, Hannover (DE)

(21) Appl. No.: 16/310,147

(22) PCT Filed: Jun. 15, 2017
(86) PCT No.: PCT/EP2017/064728

§ 371 Date: Dec. 14, 2018

(30) Foreign Application Priority Data
Jun. 15, 2016 (EP) 16174672.2

(51) Int. Cl. G01N 33/564; C07K 16/24

(52) U.S. Cl. CPC G01N 33/564; C07K 16/24; A61K 31/52; G01N 2800/52; G01N 2800/102

(57) ABSTRACT

The present invention relates to a method for managing the therapy of patients and patient (sub)populations (responder/non-responder) suffering from rheumatoid arthritis (RA) and to the use of suitable marker sequences, in particular in the form of panels, diagnostic agents and test kits, and to their use in rheumatoid arthritis (RA) diagnosis, prognosis and therapy management, in particular for drug-based therapy.

[0001] The present invention relates to a method for managing the therapy of patients and patient (sub)populations (responder/non-responder) suffering from rheumatoid arthritis (RA) and to the use of suitable marker sequences, in particular in the form of panels, diagnostic agents and test kits, and to their use in rheumatoid arthritis (RA) diagnosis, prognosis and therapy management, in particular for drug-based therapy.

[0002] Rheumatoid arthritis (RA) is an autoimmune disease affecting approximately 1% of the population of the western world. Chronic inflammatory processes within the first year of the disease (early RA) lead already to progressive, joint-destroying synovitis. If the RA is not identified in good time and treated aggressively within a certain time window (“window of opportunity”), it leads to the destruction of joints with significant physical limitations and systematic manifestations, which lead to disabilities and reduced life expectancy.

[0003] In the early phase of the disease, for patients with joint inflammation, the criteria for diagnosis of RA and differentiation between arthritis and merely arthralgia (joint pain) are often difficult. This delays the therapy management for patients with possible early RA, and therefore the joint destruction can progress if the diagnosis is unclear.

[0004] Markers for the early detection of RA or prognosis and therapy management are therefore immensely important, in particular in patients of rheumatoid arthritis (RA) who are already receiving drug-based therapy.

[0005] The current classification criteria published jointly by the American College for Rheumatology (ACR) and the European League Against Rheumatism (EULAR) in 2010 (Aletaha, Neogi et al. 2010) are intended to facilitate an early diagnosis of RA by the determination of autoantibodies (AAB) against citrullinated antigens (ACPAs), such that disease-modifying therapy is started as early as possible and irreversible consequences of the disease are prevented.

[0006] ACPA autoantibodies are positively detectable in approximately 75% of patients with established RA, but only in approximately 62% of patients with early RA.

[0007] This emphasises the need for further markers for the early diagnosis of RA, prognosis, and therapy management.

[0008] Marker sequences for the diagnosis of RA are disclosed in WO2009030226. These marker sequences were discovered by a method in which serum samples from RA patients and those from healthy individuals were examined comparatively and the results were analysed statistically. The marker sequences described in WO 2009030226 are suitable for the diagnosis of RA, but are not sufficiently suitable for predicting the therapy response.

[0009] Previously, RA was considered to be a disease in which primarily autoantibodies against citrullinated peptides are produced. In a small number of publications, autoantibodies against posttranslational unmodified proteins or peptides have also been described (Hueber, Tomooka et al. 2009; Somers, Geusens et al. 2011), however there have been no attempts to seek new autoantibodies systematically or to use these for the identification of patient (sub)groups.

[0010] Based on the recommendations published in 2010 of the European League Against Rheumatism (EULAR), the primary goal of the treatment of RA is to stop the disease progression and achieve disease remission (Smolen, Landewé et al. 2010).

[0011] The prospect of success of disease remission can be significantly improved, in particular in early RA, by the use of a disease-modifying therapy (DMARD—disease modifying anti-rheumatic drug, or what is known as basic therapy).

[0012] Conventional DMARDs include a group of drugs which has disease-modifying properties going beyond symptomatic effects.

[0013] The effect of DMARDs is generally delayed, with the time until response being 4-16 weeks.

[0014] In particular methotrexate (MTX), which belongs to the group of conventional DMARDs, has become part of the standard and initial therapy for RA. Other suitable drugs are azathioprine, sulfasalazine, chloroquine/hydroxychloroquine, leflunomide, cyclophosphamide, D-penicillamine or cyclosporine and also biological DMARDs.

[0015] The so-called biological DMARDs include therapeutic antibodies, which block the effect of the inflammatory cytokine—tumor necrosis factor alpha (TNF). TNF is a central regulator of the immune system and is involved in inflammatory processes in a series of rheumatoid diseases, such as RA, lupus, ankylosing spondylitis, psoriasis, Crohn's disease, colitis ulcerosa and juvenile chronic arthritis.

[0016] The development of what are known as TNF blockers has significantly improved the treatment of RA and other rheumatoid diseases and has led to a significant improvement in quality of life.

[0017] Generally, there are two approaches for inhibiting TNF activity. On the one hand, by means of monoclonal therapeutic antibodies, the binding of TNF to its receptor can be prevented. To this end, various anti-TNF blockers are approved for the treatment of RA, such as infliximab (Remicade®), adalimumab (Humira®), certolizumab pegol (Cimzia®) and golimumab (Simponi®).

[0018] It is also possible to inhibit the binding of TNF to the body's own receptor by soluble, recombinantly produced TNF receptor, such as etanercept (Enbrel®).

[0019] In spite of generally good efficacy, merely 40-50% of RA patients demonstrate a satisfactory clinical improvement under MTX therapy. Furthermore, MTX therapy may be accompanied by toxic effects and undesirable side-effects, which often cause patients to abort MTX therapy.

[0020] In numerous clinical studies it has been possible to show that the various TNF blockers demonstrate a comparable efficacy compared to MTX and largely inhibit the progression of RA with damage of the joints. Clinical studies, however, have shown that approximately 20-50% of the treated RA patients respond only insufficiently to TNF blockers. Alternative therapies have been developed for these patients and are based for example on the inhibition of B-cells, such as rituximab (Rituxan).

[0021] In view of the high treatment costs and possible side-effects, however, there are no suitable predictors, that is to say diagnostic marker sequences, for the selection of specific and suitable therapy forms and also for clinical decision-making for RA patients.

[0022] By means of the use according to the invention of markers (marker sequences) for identifying patients that respond to MTX therapy (responder=R) or that do not respond (non-responder=NR), it is possible to select the best therapy for patient (sub)groups having a specific marker profile.

[0023] In accordance with EULAR and ACR recommendations, firstly conventional DMARDs (usually MTX) are administered following diagnosis, and the clinical efficacy is monitored over six months. In the absence of efficacy or in the event that side-effects are encountered, it is possible to change to a biological DMARD, usually a TNF blocker. This has the disadvantage, however, that in the case of an absence of efficacy, valuable time is lost and the disease continues to progress unhindered.

[0024] Clinical studies have shown that early intense treatment of patients with early RA using combination therapy constituted by TNF blockers and MTX can also improve the prognosis of the disease compared to MTX monotherapy (Detert, Bastian et al. 2013) and represents an alternative drug-based therapy.

[0025] There is an absence, however, of suitable predictors or markers (marker sequences) for identifying (sub)groups of patients who might benefit from aggressive combination therapy of this kind.

[0026] The object of the present invention is therefore to improve the therapy by means of drug-based treatment (DMARD) and also in respect of clinical decision-making.

[0027] The object is achieved by the technical teaching of the claims.

[0028] The object of the invention is therefore also to provide a prognosis and to manage therapy in the treatment of RA patients by means of an in-vitro diagnosis, in particular for RA patients who are already undergoing drug-based therapy.

[0029] The object is achieved in accordance with the invention in that a method for in-vitro diagnosis is provided, which contains selected autoantigens (markers) for detecting autoantibodies from bodily fluids of an RA patient undergoing drug-based therapy.

[0030] The invention therefore relates to a method for stratification and therapy management of rheumatoid arthritis patients undergoing drug-based therapy, wherein responders and/or non-responders to the drug-based therapy are identified by means of an in-vitro diagnosis, wherein at least one marker sequence is selected from the group SEQ ID No. 1-208.

[0031] The autoantigens or markers (marker sequences) according to the invention are identified by means of a differential method comprising multiple steps, in which serum samples from healthy individuals and RA patients undergoing drug-based therapy are examined comparatively in respect of their reactivity with multiple potential antigens, and these results are statistically analysed.

[0032] The selection of the serum samples and the sequence of the steps surprisingly make it possible to identify markers (marker sequences) in patients with early and established RA undergoing drug-based therapy and are also suitable for identifying RA patient (sub)groups and can increase the prospect of success to therapeutic success.

[0033] The invention therefore relates to a method for identifying marker sequences for rheumatoid arthritis (RA), comprising the steps of:
[0034] a) bringing serum samples of RA patients into contact with more than 5,000 antigens coupled to (Luminex) beads, measuring the binding of the individual antigens to proteins in the serum of the RA patients by immunofluorescence assay, and determining the median fluorescence intensity (MFI) for each individual antigen;
[0035] b) bringing serum samples of healthy individuals into contact with the same antigens coupled to (Luminex) beads, measuring the binding of the individual antigens to proteins in the serum of the healthy individuals by immunofluorescence assay, and determining the median fluorescence intensity (MFI) for each individual antigen;
[0036] c) statistically evaluating the MFI data of each individual antigen from a) and b) by means of univariant analysis and thus identifying markers with which RA patients can be distinguished from healthy individuals;
[0037] d) wherein the markers are selected from the sequences SEQ ID No. 1 to 208, partial sequences or fragments thereof, and homologues of sequences SEQ ID No. 1-208 with at least 90% homology.

[0038] In the field of microarrays flat substrates are used, to which marker sequences or sequences to be examined are bound. In protein biochips the marker sequences to be examined or the sequences binding to these marker sequences are immobilised on a solid, flat support. An alternative arrangement or panel of marker sequences or sequences to be examined is possible on beads, which therefore differ inter alia in view of their sensitivity and specificity from conventional microarrays. Bead arrays are created for example by impregnating pellets either with different concentrations of fluorescent dye or for example by barcode technology. The pellets can be addressed and can be used to identify specific binding events that occur on their surface. Bead technology is based on microscopically small spherical pellets or platelets, which are referred to as microspheres or beads. These beads can serve analogously to ELISA and Western Blot as solid phase for biochemical detection reactions. A wide range of different bead types are available, which for example differ in their fluorescence shade and each of which carries its own specific detection reagent on the surface. In this way, an accordingly large number of different detection reactions can be carried out simultaneously in a very small sample volume. With bead arrays specific interactions between two defined biochemical compounds can be detected. Compared with conventional microarrays, the bead-based validation is characterised by a particularly high sensitivity and specificity. With the method according to the invention and the use of beads for validation, marker sequences for RA can be identified that differ in terms of their sensitivity and specificity from the previously known marker sequences.

[0039] The invention also relates to a marker sequence for rheumatoid arthritis obtainable by a method according to the invention, wherein the marker sequence is selected from the group of sequences SEQ ID No. 1 to 208, partial sequences or fragments thereof, and homologues of sequences SEQ ID No. 1-208 with at least 90% homology.

[0040] The invention also relates to the use of one or more marker sequence(s) according to the invention for the stratification and therapy management of rheumatoid arthritis A further embodiment concerns the use according to the invention, characterised in that 2 or 3, preferably 4 or 5, particularly preferably 6, 7 or 8 or more different marker sequences, for example 10 to 20 or 30 or more different marker sequences, are used. A set of marker sequences of this kind is referred to as a panel.

[0041] One embodiment concerns the use according to the invention, characterised in that the marker sequence(s) is/are applied to a solid support, wherein the solid support is selected from filters, membranes, wafers, for example silicon wafers, glass, metal, plastic, chips, mass spectrometry targets, matrices, and beads, for example magnetic, coated or labelled beads, such as fluorophore-labelled beads or Luminex beads.

[0042] The invention also relates to a method for the stratification and therapy management of rheumatoid arthritis, wherein

[0043] a.) at least one marker sequence according to the invention from SEQ ID No. 1-208 is applied to a solid support, preferably to a bead and

[0044] b.) is brought into contact with bodily fluid or tissue sample of a patient and

[0045] c.) an interaction of the bodily fluid or of the tissue sample with the marker sequence from a.) is detected.

[0046] Such an interaction can be detected for example by a probe, in particular by an antibody.

[0047] The invention also relates to a method for stratification, in particular for risk stratification, or for therapy management of a patient with rheumatoid arthritis, wherein at least one marker sequence according to the invention is used in order to examine a sample from the patient.

[0048] One embodiment concerns a method according to the invention for diagnosing rheumatoid arthritis, wherein the stratification or the therapy management includes decisions regarding the treatment and therapy of the patient, in particular the hospitalisation of the patient, the use, efficacy and/or dosage of one or more drugs, a therapeutic measure or the monitoring of the course of the disease and the course of therapy, aetiology or classification of the disease, inclusive of prognosis.

[0049] The invention also relates to an arrangement or panel comprising or consisting of one or more marker sequence(s) according to the invention. Preferred panels are the subject matter of the examples.

[0050] The invention also relates to an assay or protein array comprising an arrangement or panel according to the invention.

[0051] The invention also relates to a diagnostic agent for the diagnosis of rheumatoid arthritis containing at least one marker sequence according to the invention and where appropriate further auxiliaries and additives.

[0052] The invention therefore relates to the use of marker sequences for the stratification or therapy management of rheumatoid arthritis, wherein at least one marker sequence selected from the group of marker sequences SEQ ID No. 1-208 and/or the genomic sequences comprising one of the sequences SEQ ID No. 1-104 and/or a protein coded by the sequences SEQ ID No. 105-208, partial sequences or fragments thereof, and homologues of sequences SEQ ID No. 1-208 with at least 90% homology is determined for a patient to be examined.

[0053] A further embodiment of the invention concerns the use of the marker sequence(s) according to the invention for the stratification or therapy management of rheumatoid arthritis, characterised in that the determination is performed by means of in-vitro diagnosis.

[0054] The invention therefore relates to a method for identifying early RA patients undergoing drug-based therapy who do not respond to conventional DMARDs, in particular MRX, and may be non-responders or therapy-resistant.

[0055] These RA markers according to the invention are the subject of SEQ ID No. 1-3 or 105-107 of the antigens in Table 1 and Table 2, which can be used for the stratification or therapy management of RA and predict or diagnose whether an RA patient will respond to MTX treatment. Marker candidate antigens which have a p-value for the non-parametric mean value comparison between groups of <0.05, but at the same time are reactive in RA patients were selected on the basis of the univariant results for the generation of these markers.

[0056] The identified markers CCDC136 (SEQ ID No. 1), HSPB1 (SEQ ID No. 2), and IGFBP2 (SEQ ID No. 3) are therefore preferred in accordance with the invention for determining a resistance to drug-based therapy, in particular a resistance to MTX therapy.

[0057] A further embodiment of the invention relates to a method for identifying markers for identifying patient (sub)groups that respond or do not respond to conventional DMARD therapy, such as MTX.

[0058] Markers which were found by means of this embodiment of the method are named for example in Table 1 in group 5 and relate to SEQ ID No. 4-51 and/or SEQ ID No. 108-155.

[0059] A further embodiment of the invention relates to a method for identifying markers for identifying patient (sub)groups that respond or do not respond to combination therapy of biological and conventional DMARD, such as anti-TNF blockers and MTX.

[0060] Markers which were found by means of this embodiment of the method are named for example in Table 1 in group 6 and relate to SEQ ID No. 52-104 and/or SEQ ID No. 156-208.

[0061] On account of the high clinical and serological heterogeneity of the RA disease, it is difficult to provide an unequivocal RA diagnosis using just one biomarker. It is therefore often necessary to combine maximum uncorrelated autoantigens to form what are known as panels of markers (biomarker panels for RA).

[0062] For example, within the scope of tailored medicine, corresponding panels of markers for RA can be individually compiled for individual patients or patient groups for the relevant RA subtype (subgroup). It is therefore also necessary to provide multiple potential markers for RA in order to select appropriate RA markers specific to corresponding subgroups or subtypes for each individual case. A corresponding panel can be provided for example in the form of an arrangement, an array or also one or more beads, preferably Luminex beads. The invention thus relates to an arrangement comprising one or more markers according to the invention, a protein array comprising one or more markers according to the invention, a bead (pellet or platelet) comprising one or more markers according to the invention.

[0063] The marker sequences according to the invention were able to be identified by means of differential screening of samples from healthy test subjects with patient samples with rheumatoid arthritis. The marker sequences according to the invention were then expressed and, following coupling of the expressed marker sequence candidates to Luminex beads, validated with the aid of the Luminex beads, partly by comparison with known biomarkers for rheumatoid arthritis. Highly specific marker sequences could thus be identified for rheumatoid arthritis.

[0064] “Beads” (pearls, pellets, originally also referred to as latex particles) designate what are known as microspheres or microparticles, which are used as supports for biomolecules in tests and assays. Uniform (approximately equally sized) microparticles that are produced by special chemical methods are required for tests and assays. These methods are known to a person skilled in the art.

[0065] Beads for different applications are also commercially available (for example from the company Progen Biotechnik GmbH). Beads may consist of different materials, for example glass, polystyrene, PMMA and different other polymers, partly also copolymers. Beads can be labelled with different dyes or dye mixtures and can be provided with coatings. Biomolecules can be coupled to the surface of beads. Different coupling methods are available for this purpose and are known to a person skilled in the art, for example adsorption or covalent coupling. The surface of the beads can be modified, such that a directed coupling of the biomolecules on the bead surface, for example in conjunction with spacers, tags or special modifications, is possible, and whereby the analytical sensitivity can be further increased.

[0066] The term “rheumatoid arthritis (RA)” is defined for example by Pschyrembel, de Gruyter, 261^{st} edition (2007), Berlin. In accordance with the invention “juvenile idiopathic arthritis” is also included (ICD-10: M08.-. abb.: JIA. Earlier synonyms: juvenile rheumatoid arthritis, juvenile chronic arthritis, Still's disease or the popular name “child's rheumatism”) and is the collective term for a series of diseases primarily affecting the joints (arthritis) of rheumatic origin in childhood (juvenile) (definition for example according to Pschyrembel, de Gruyter, 261^{st} edition (2007), Berlin).

[0067] In a preferred embodiment the marker sequences are determined outside the human body and the determination is performed in an ex vivo/in vitro diagnosis.

[0068] In the sense of this invention, “diagnosis” means the positive determination of rheumatoid arthritis by means of the marker sequences according to the invention as well as the assignment of the patients to the indication “rheumatoid arthritis”. The term diagnosis includes the medical diagnostics and examinations in this regard, in particular in-vitro diagnostics and laboratory diagnostics, and also proteomics and nucleic acid blotting. Further tests may be necessary to be sure and to exclude other diseases. The term diagnosis therefore also includes the differential diagnosis of rheumatoid arthritis by means of the marker sequences according to the invention, and the prognosis in the case of determined rheumatoid arthritis.

[0069] The invention also relates to a method for the stratification, in particular risk stratification and/or therapy management of a patient with rheumatoid arthritis, for example in a patient with a very early stage of RA that cannot be detected by means of the marker CCP, wherein at least one marker sequence according to the invention is determined on a patient to be examined. The stratification of the patient with rheumatoid arthritis in new or established sub-groups within the disease rheumatoid arthritis is also included, as well as the expedient selection of patient groups for the selection for therapy with certain active agents. The term therapy management also includes, in accordance with the invention, the division of patients into responders and non-responders in respect of a drug-based therapy or the course of a therapy.

[0070] In accordance with the invention “stratification or therapy management” means in particular the prediction/prognosis and monitoring of the response or non-response to a medicament/drug for the treatment of RA or a modified therapy and also follow-up care.

[0071] In the sense of this invention, “stratification or therapy management” means that the method according to the invention renders possible decisions for the treatment and therapy of the patient, whether it is the hospitalisation of the patient, the use, efficacy and/or dosage of one or more drugs, a therapeutic measure, or the monitoring of the course of a disease and the course of therapy or aetiology or classification of RA, for example into a new or existing subtype, or the differentiation of RA and relevant patients.

[0072] In a further embodiment of the invention, the term “stratification” in particular includes the risk stratification with the prognosis of an “outcome” of a negative health event.

[0073] Within the scope of this invention, the term “patient” is understood to mean any test subject (human or mammal), with the provision that the test subject is examined for rheumatoid arthritis, in particular therapeutic success or therapeutic improvement, or with the provision that the test subject or the individual is examined for RA and is receiving or being administered drugs for the treatment of RA, for example by means of basic therapy (see above).

[0074] The term “marker sequences” in the sense of this invention means that the nucleic acid sequence, for example the mRNA, cDNA or the polypeptide or protein obtainable therefrom are significant for rheumatoid arthritis. By way of example the mRNA or cDNA or the polypeptide or protein obtainable therefrom can interact with substances from the bodily fluid or tissue sample of a patient with rheumatoid arthritis (for example (auto)antigen (epitope)/(auto)antibody (paratope) interaction). In a particularly preferred embodiment of the invention the RA marker is an antigen or part of an antigen or codes for an antigen or for part of an antigen.

[0075] In the sense of the invention “wherein at least one marker sequence selected from the group of marker sequences SEQ ID No. 1-208 and/or the genomic sequences comprising one of the sequences SEQ ID No. 1-104 and/or a protein coded by the sequences SEQ ID No. 105-208, partial sequences or fragments thereof, or homologues of sequences SEQ ID No. 1-208 with at least 90% homology is determined for a patient to be examined” means that an interaction between the bodily fluid or the tissue sample of a patient and the marker sequence(s) according to the invention is detected. Such an interaction is, for example, a binding, in particular a binding substance at least at one of the marker sequences according to the invention, or in the case of a cDNA is the hybridisation with a suitable substance under selected conditions, in particular stringent conditions (for example as defined typically in J. Sambrook, E. F. Fritsch, T. Maniatis (1989), Molecular cloning: A laboratory manual, 2nd Edition, Cold Spring Habor Laboratory Press, Cold Spring Habor, USA or Ausubel, “Current Protocols in Molecular Biology”, Green Publishing Associates and Wiley Interscience, N.Y. (1989)). One example for stringent hybridisation conditions is: hybridisation in 4×SSC at 65° C. (alternatively in 50% formamide and 4×SSC at 42° C.), followed by a number of washing steps in 0.1×SSC at 65° C. for a total of about one hour. One example for less stringent hybridisation conditions is hybridisation in 4×SSC at 37° C., followed by a number of washing steps in 1×SSC at room temperature.

[0076] Such substances, in accordance with the invention, are part of a bodily fluid, in particular blood, whole blood, blood plasma, blood serum, patient serum, urine, cerebrospinal fluid, synovial fluid, or a tissue sample of the patient.

[0077] The substances from the bodily fluid or tissue sample occur or are expressed either only, or at least in an intensified manner in the case of RA, whereas these substances are not present or at least are present only to a smaller extent (smaller amount, lower concentration) in patients without RA or healthy individuals. RA markers can also be characterised on the other hand in that they interact with substances from the bodily fluid or tissue sample of RA patients because these substances are no longer expressed or are expressed at least in a much smaller amount/concentration in the case of RA, whereas these substances are present or are present at least in a much higher level in patients without RA. Markers for RA can also be provided in healthy test subjects, but their amount (concentration) changes for example with the emergence, establishment and therapy of RA. One or more markers can in this way depict a profile of substances from bodily fluid and tissue sample, for example an RA-associated autoantibody profile of the patient in question. Markers according to the invention are biomarkers for RA.

[0078] Autoantibody profiles comprise the amount of one or more autoantibodies, the occurrence/expression of which is accompanied by the emergence and/or establishment of RA. Autoantibody profiles thus comprise on the one hand the composition, i.e. for example one or more autoantibodies is/are expressed only in the case of RA, and on the other hand the amount/concentration of individual autoantibodies, i.e. the amount/concentration of individual autoantibodies changes with the emergence and establishment of RA. These changes can be detected with the aid of the marker sequences according to the invention.

[0079] The marker sequences according to the invention SEQ ID No. 1-208 are specified in Table 1 and can be unambiguously identified (see RefSeq Accession or GI Accession) by the respective cited database entries (also by means of the Internet: http://www.ncbi.nlm.nih.gov/).

[0080] The invention therefore also relates to the full-length sequences of the marker sequences according to the invention and the marker sequences as defined in the tables via the known database entries and also the marker sequences specified in the accompanying sequence protocol.

[0081] The invention furthermore likewise includes analogous embodiments of the marker sequences, in particular of the nucleic acid sequences SEQ ID No. 1-104 and the protein sequences SEQ ID No. 105-208.

[0082] In a further embodiment of the invention marker sequences are preferred that have P-values less than or equal to 0.006, preferably less than or equal to 0.001 or less than or equal to 0.0001, particularly preferably less than or equal to 0.00001 (see the tables).

[0083] In a further embodiment of the invention homologues of the marker sequences according to the invention are included. In particular, these are homologues having an identity of 70%, 80% or 85%, preferably 90%, 91%, 92%, 93%, 94% or 95% identity, in particular 96%, 97%, 98%, 99% or more identity, with the marker sequences according to the invention and suitable for the use according to the invention—the detection of rheumatoid arthritis (what are known as “homologues” or homologous marker sequences). Homologues can be protein sequences or nucleic acid sequences.

[0084] Partial sequences or fragments are sequences that comprise 50 to 100 nucleotides or amino acids, preferably 70-120 nucleotides or amino acids, particularly preferably 100 to 200 nucleotides or amino acids of one of the marker sequences SEQ ID No. 1-208.

[0085] In accordance with the invention the marker sequences also comprise modifications of the nucleotide sequence, for example of the cDNA sequence and the corresponding amino acid sequence, such as chemical modification, for example citrullination, acetylation, phosphorylation, glycosylation or polyA strand and further modifications known accordingly to a person skilled in the art.

[0086] In a further embodiment the respective marker sequence can be represented in different amounts in one or more regions on a solid support, for example a bead. This allows a variation of the sensitivity. The regions may each comprise a totality of marker sequences, i.e. a sufficient number of different marker sequences, in particular 2 to 5 or 10 or more marker sequences, and where appropriate further nucleic acids and/or proteins, in particular biomarkers. However, at least 96 to 25,000 (numerically) or more different or identical marker sequences and further nucleic acids and/or proteins, in particular biomarkers, are preferred. Furthermore, more than 2,500 different or identical marker sequences are preferred, particularly preferably 10,000 or more, and where appropriate further nucleic acids and/or proteins, in particular biomarkers.

[0087] Within the scope of this invention, “arrangement” or “panel” is synonymous with “array”, and, if this “array” is used to identify substances to be bound on marker sequences, this is to be understood to be an “assay” or a diagnostic device. In a preferred embodiment the arrangement is designed such that the marker sequences represented on the arrangement are present in the form of a grid on a solid support. Furthermore, preferred arrangements are those that permit a high-density arrangement of marker sequences, and the marker sequences are spotted.

[0088] Such high-density spotted arrangements are disclosed for example in WO 99/57311 and WO 99/57312 and can be used advantageously in a robot-assisted automated high-throughput method.

[0089] Within the scope of this invention, however, the term “assay” or diagnostic device likewise comprises those embodiments of a device such as ELISA (for example individual wells of a microtitre plate are coated with the marker sequences or combinations of marker sequences according to the invention, and where appropriate are applied to the individual wells of the microtitre plate in a robot-assisted manner; examples include diagnostic ELISA kits from the company Phadia or “Searchlight” Multiplex ELISA kits from the company Pierce/Thermo Fisher Scientific), bead-based assay (spectrally distinguishable bead populations are coated with marker sequences/combinations of marker sequences. The patient sample is incubated with this bead population and bound (auto)antibodies are detected by means of a further fluorescence-labelled secondary antibody or a detection reagent by measuring the fluorescence; for example Borrelia IgG kit or Athena Multilyte from the company Multimetrix), line assay (marker sequences or combinations of marker sequences according to the invention are immobilised in a robot-assisted manner on membranes, which are examined or incubated with the patient sample; example “Euroline” from the company Euroimmun AG), Western Blot (example “Euroline-WB” from the company Euroimmun AG), and immunochromatographic methods (for example what are known as lateral flow immunoassays; marker sequences or combinations of marker sequences are immobilised on test strips (membranes, U.S. Pat. No. 5,714,389 and many others); example “One Step HBsAg” test device from Acon Laboratories) or similar immunological single or multiplex detection methods.

[0090] A further object of the invention is therefore that of providing a diagnostic device or an assay, in particular a protein biochip, which allows a stratification and therapy management for rheumatoid arthritis.

[0091] In order to achieve this object, the marker sequences of the arrangement or panel according to the invention are fixed on a solid support, but preferably spotted or immobilised or imprinted, i.e. are applied reproducibly. One or more marker sequences can be present repeatedly in the totality of all marker sequences and can be present in different amounts based on a spot. Furthermore, the marker sequences on the solid support can be standardised (for example by means of serial dilution series for example of human globulins as internal calibrators for data standardisation and quantitative assessment).

[0092] The invention therefore concerns an assay or protein biochip or one or more beads (bead-based assay) consisting of an arrangement or panel containing marker sequences according to the invention.

[0093] In a further embodiment the marker sequences are present as clones. Such clones can be obtained for example by means of a cDNA expression library according to the invention (Bissow et al. 1998 (above)). In a preferred embodiment such expression libraries containing clones are obtained using expression vectors from a cDNA expression library consisting of the cDNA marker sequences. These expression vectors preferably contain inducible promoters. The induction of the expression can be carried out for example by means of an inducer, such as IPTG. Suitable expression vectors are described in Terpe et al. (Terpe T Appl Microbiol Biotechnol. 2003 January; 60(5):523-33).

[0094] Expression libraries are known to a person skilled in the art; they can be produced in accordance with standard works, such as Sambrook et al, “Molecular Cloning, A laboratory handbook, 2nd edition (1989), CSH press, Cold Spring Harbor, N.Y. Expression libraries that are tissue-specific (for example human tissue, in particular human organs) are furthermore preferable. Further, expression libraries that can be obtained by means of exon-trapping are also comprised in accordance with the invention. Instead of the term expression library, reference may also be made synonymously to an expression bank.

[0095] Protein biochips or beads or corresponding expression libraries that do not exhibit any redundancy (what is known as a Uniclone® library) and that can be produced in accordance with the teaching of WO 99/57311 and WO 99/57312 are furthermore preferred. These preferred Uniclone® libraries have a high proportion of non-defective fully expressed proteins of a cDNA expression library.

[0096] Within the scope of this invention the clones can also be, but are not limited to, transformed bacteria, recombinant phages or transformed cells of mammals, insects, fungi, yeasts or plants.

[0097] The clones are fixed, spotted or immobilised on a solid support.

[0098] The invention therefore relates to an arrangement, wherein the marker sequences are present as clones.

[0099] In addition, the marker sequences can be present in the respective form of a fusion protein, which for example contains at least one affinity epitope or “tag”. The tag may be or may contain one such as c-myc, his tag, arg tag, FLAG, alkaline phosphatase, V5 tag, T7 tag or strep tag, HAT tag, NusA, S tag, SBP tag, thioredoxin, DsbA, a fusion protein, preferably a cellulose-binding domain, green fluorescent protein, maltose-binding protein, calmodulin-binding protein, glutathione S-transferase or lacZ.

[0100] A marker sequence can be composed of a number of individual marker sequences. This may include the cloning of individual fragments to form a large common fragment and the expression of this combined fragment.

[0101] In all embodiments, the term “solid support” includes embodiments such as a filter, a membrane, a magnetic or fluorophore-labelled pellet, a silicon wafer, glass, metal, plastic, a chip, a mass spectrometry target or a matrix.

[0102] However, a filter and beads are preferred in accordance with the invention.

[0103] Furthermore, PVDF, nitrocellulose or nylon is preferred as a filter (for example Immobilon P Millipore, Protran Whatman, Hybond N+ Amersham).

[0104] In a further preferred embodiment of the arrangement according to the invention, this corresponds to a grid with the dimensions of a microtiter plate (8-12 well strips, 96 wells, 384 wells or more), a silicon wafer, a chip, a mass spectrometry target or a matrix.

[0105] In a further preferred embodiment pellets or what are known as beads are used as support. Here, bead-based multiplex assays are preferably used. The analysis and evaluation of the bead-based assays can be performed for example with a Luminex analysis system, which is performed on the basis of the method of flow cytometry with use of two different lasers.

[0106] Whereas the measurements on planar protein arrays offer merely a dynamic range of 1.5-2 magnitudes (powers of 10), a dynamic range of 3.5-4 magnitudes can be covered by the use of Luminex beads. The measurements in the low response ranges also provide very good coefficients of variation (CVs), i.e. no more than 10%.

[0107] Whereas the measurements on planar protein arrays offer merely coefficients of variation (CVs) from 10 to 25% (intra-array comparison) or 10 to 50% (inter-array comparison), the CVs of the Luminex measurements are located between 3 to 10%. An assay quality not generally achieved by commercial ELISAs is thus provided. The known disadvantages (limited plexing rate by interference of different detection antibodies) for Luminex-based analysis and diagnostic methods do not occur with the UNIarray concept, since merely a single fluorescence-labelled anti-human IgG from goat, sheep or mouse is used as detection probe. Due to the transfer of the UNIarray concept to Luminex (i.e. bead-based protein arrays), a number of apparatuses can additionally be saved, i.e. protein printers, hybridisation machines and array readers, and can be replaced by one apparatus. Here, the UNIarray concept is not bound to Luminex, but can also be used on other platforms, such as Randox, VBC Genomics, etc. The high measurement accuracy and the low CVs of the individual measurements allow the use of better and new statistical methods for the identification of potent individual markers and also for rapid sorting of false positives.

[0108] Protein-protein interactions (for example protein at the marker sequence, such as antigen/antibody) or corresponding “means for detecting the binding success” can be visualised for example by means of fluorescence labelling, biotinylation, radio-isotope labelling or colloidal gold or latex particle labelling in the conventional manner. Bound antibodies are detected with the aid of secondary antibodies, which are labelled using commercially available reporter molecules (for example Cy, Alexa, Dyomics, FITC or similar fluorescent dyes, colloidal gold or latex particles), or with reporter enzymes, such as alkaline phosphatase, horseradish peroxidase, etc., and the corresponding colorimetric, fluorescent or chemiluminescent substrates. A readout is performed for example by means of a microarray laser scanner, a CCD camera or visually.

### EXAMPLES

TABLE 1
Marker sequences (antigens)

| No. | Gene ID | Gene Symbol | Gene Name | Group |
|---|---|---|---|---|
| 1 | 64753 | CCDC136 | coiled-coil domain containing 136 | Group 1 |
| 2 | 3281 | HSBP1 | heat shock factor binding protein 1 | Group 1 |
| 3 | 3485 | IGFBP2 | insulin-like growth factor binding protein | Group 1 |
| | | | 2, 36 kDa | |
| 4 | 10476 | ATP5H | ATP synthase, H+ transporting, | Group 5 |
| | | | mitochondrial Fo complex, subunit d | |
| 5 | 7812 | CSDE1 | cold shock domain containing E1, RNA- | Group 5 |
| | | | binding | |
| 6 | 1485 | CTAG1B | cancer/testis antigen 1B | Group 5 |
| 7 | 8320 | EOMES | eomesodermin | Group 5 |
| 8 | 10961 | ERP29 | endoplasmic reticulum protein 29 | Group 5 |
| 9 | 84893 | FBXO18 | F-box protein, helicase, 18 | Group 5 |
| 10 | 3059 | HCLS1 | hematopoietic cell-specific Lyn substrate 1 | Group 5 |
| 11 | 3182 | HNRNPAB | heterogeneous nuclear ribonucleoprotein A/B | Group 5 |
| 12 | 3798 | KIF5A | kinesin family member 5A | Group 5 |
| 13 | 8079 | MLF2 | myeloid leukemia factor 2 | Group 5 |
| 14 | 60560 | NAA35 | N(alpha)-acetyltransferase 35, NatC | Group 5 |
| | | | auxiliary subunit | |
| 15 | 8473 | OGT | O-linked N-acetylglucosamine (GlcNAc) | Group 5 |
| | | | transferase | |
| 16 | 5174 | PDZK1 | PDZ domain containing 1 | Group 5 |
| 17 | 23645 | PPP1R15A | protein phosphatase 1, regulatory subunit 15A | Group 5 |
| 18 | 64062 | RBM26 | RNA binding motif protein 26 | Group 5 |
| 19 | 23170 | TTLL12 | tubulin tyrosine ligase-like family member 12 | Group 5 |
| 20 | 91544 | UBXN11 | UBX domain protein 11 | Group 5 |
| 21 | 6944 | VPS72 | vacuolar protein sorting 72 homolog | Group 5 |
| | | | (S. cerevisiae) | |
| 22 | 163033 | ZNF579 | zinc finger protein 579 | Group 5 |
| 23 | 23625 | FAM89B | family with sequence similarity 89, member B | Group 5 |
| 24 | 27344 | PCSK1N | proprotein convertase subtilisin/kexin | Group 5 |
| | | | type 1 inhibitor | |
| 25 | 64762 | GAREM | GRB2 associated, regulator of MAPK1 | Group 5 |
| 26 | 30 | ACAA1 | acetyl-CoA acyltransferase 1 | Group 5 |
| 27 | 11093 | ADAMTS13 | ADAM metallopeptidase with thrombospondin | Group 5 |
| | | | type 1 motif, 13 | |
| 28 | 204 | AK2 | adenylate kinase 2 | Group 5 |
| 29 | 211 | ALAS1 | 5′-aminolevulinate synthase 1 | Group 5 |
| 30 | 90416 | C15orf57 | chromosome 15 open reading frame 57 | Group 5 |
| 31 | 51531 | TRMO | tRNA methyltransferase O | Group 5 |
| 32 | 1108 | CHD4 | chromodomain helicase DNA binding protein 4 | Group 5 |
| 33 | 22982 | DIP2C | disco-interacting protein 2 homolog C | Group 5 |
| 34 | 9454 | HOMER3 | homer scaffolding protein 3 | Group 5 |
| 35 | 3490 | IGFBP7 | insulin-like growth factor binding protein 7 | Group 5 |
| 36 | 10445 | MCRS1 | microspherule protein 1 | Group 5 |
| 37 | 112950 | MED8 | mediator complex subunit 8 | Group 5 |
| 38 | 65003 | MRPL11 | mitochondrial ribosomal protein L11 | Group 5 |
| 39 | 7469 | NELFA | negative elongation factor complex member A | Group 5 |
| 40 | 84081 | NSRP1 | nuclear speckle splicing regulatory | Group 5 |
| | | | protein 1 | |
| 41 | 81572 | PDRG1 | p53 and DNA-damage regulated 1 | Group 5 |
| 42 | 5494 | PPM1A | protein phosphatase, Mg2+/Mn2+ dependent, 1A | Group 5 |
| 43 | 5536 | PPP5C | protein phosphatase 5, catalytic subunit | Group 5 |
| 44 | 9727 | RAB11FIP3 | RAB11 family interacting protein 3 (class II) | Group 5 |
| 45 | 10111 | RAD50 | RAD50 homolog, double strand break repair | Group 5 |
| | | | protein | |
| 46 | 6449 | SGTA | small glutamine-rich tetratricopeptide | Group 5 |
| | | | repeat (TPR)-containing, alpha | |
| 47 | 116841 | SNAP47 | synaptosomal-associated protein, 47 kDa | Group 5 |
| 48 | 10290 | SPEG | SPEG complex locus | Group 5 |
| 49 | 10422 | UBAC1 | UBA domain containing 1 | Group 5 |
| 50 | 65109 | UPF3B | UPF3 regulator of nonsense transcripts | Group 5 |
| | | | homolog B (yeast) | |
| 51 | 8882 | ZPR1 | ZPR1 zinc finger | Group 5 |
| 52 | 39 | ACAT2 | acetyl-CoA acetyltransferase 2 | Group 6 |
| 53 | 348 | APOE | apolipoprotein E | Group 6 |
| 54 | 128061 | C1orf131 | chromosome 1 open reading frame 131 | Group 6 |
| 55 | 79714 | CCDC51 | coiled-coil domain containing 51 | Group 6 |
| 56 | 6249 | CLIP1 | CAP-GLY domain containing linker protein 1 | Group 6 |
| 57 | 30827 | CXXC1 | CXXC finger protein 1 | Group 6 |
| 58 | 9704 | DHX34 | DEAH (Asp-Glu-Ala-His) box polypeptide 34 | Group 6 |
| 59 | 57572 | DOCK6 | dedicator of cytokinesis 6 | Group 6 |
| 60 | 84444 | DOT1L | DOT1-like histone H3K79 methyltransferase | Group 6 |
| 61 | 23301 | EHBP1 | EH domain binding protein 1 | Group 6 |
| 62 | 8661 | EIF3A | eukaryotic translation initiation factor | Group 6 |
| | | | 3, subunit A | |
| 63 | 1982 | EIF4G2 | eukaryotic translation initiation factor 4 | Group 6 |
| | | | gamma, 2 | |
| 64 | 63877 | FAM204A | family with sequence similarity 204, | Group 6 |
| | | | member A | |
| 65 | 54865 | GPATCH4 | G patch domain containing 4 | Group 6 |
| 66 | 2922 | GRP | gastrin-releasing peptide | Group 6 |
| 67 | 84064 | HDHD2 | haloacid dehalogenase-like hydrolase | Group 6 |
| | | | domain containing 2 | |
| 68 | 80895 | ILKAP | integrin-linked kinase-associated | Group 6 |
| | | | serine/threonine phosphatase | |
| 69 | 23479 | ISCU | iron-sulfur cluster assembly enzyme | Group 6 |
| 70 | 57498 | KIDINS220 | kinase D-interacting substrate, 220 kDa | Group 6 |
| 71 | 3875 | KRT18 | keratin 18, type I | Group 6 |
| 72 | 29094 | LGALSL | lectin, galactoside-binding-like | Group 6 |
| 73 | 79888 | LPCAT1 | lysophosphatidylcholine acyltransferase 1 | Group 6 |
| 74 | 4357 | MPST | mercaptopyruvate sulfurtransferase | Group 6 |
| 75 | 10528 | NOP56 | NOP56 ribonucleoprotein | Group 6 |
| 76 | 51602 | NOP58 | NOP58 ribonucleoprotein | Group 6 |
| 77 | 9315 | NREP | neuronal regeneration related protein | Group 6 |
| 78 | 23762 | OSBP2 | oxysterol binding protein 2 | Group 6 |
| 79 | 55593 | OTUD5 | OTU deubiquitinase 5 | Group 6 |
| 80 | 79668 | PARP8 | poly (ADP-ribose) polymerase family, | Group 6 |
| | | | member 8 | |
| 81 | 23089 | PEG10 | paternally expressed 10 | Group 6 |
| 82 | 9360 | PPIG | peptidylprolyl isomerase G (cyclophilin G) | Group 6 |
| 83 | 84687 | PPP1R9B | protein phosphatase 1, regulatory subunit 9B | Group 6 |
| 84 | 5589 | PRKCSH | protein kinase C substrate 80K-H | Group 6 |
| 85 | 5834 | PYGB | phosphorylase, glycogen; brain | Group 6 |
| 86 | 117584 | RFFL | ring finger and FYVE-like domain | Group 6 |
| | | | containing E3 ubiquitin protein ligase | |
| 87 | 9025 | RNF8 | ring finger protein 8, E3 ubiquitin | Group 6 |
| | | | protein ligase | |
| 88 | 6091 | ROBO1 | roundabout guidance receptor 1 | Group 6 |
| 89 | 6240 | RRM1 | ribonucleotide reductase M1 | Group 6 |
| 90 | 22937 | SCAP | SREBF chaperone | Group 6 |
| 91 | 23256 | SCFD1 | sec1 family domain containing 1 | Group 6 |
| 92 | 6382 | SDC1 | syndecan 1 | Group 6 |
| 93 | 10483 | SEC23B | Sec23 homolog B, COPII coat complex | Group 6 |
| | | | component | |
| 94 | 6576 | SLC25A1 | solute carrier family 25 (mitochondrial | Group 6 |
| | | | carrier; citrate transporter), member 1 | |
| 95 | 23384 | SPECC1L | sperm antigen with calponin homology and | Group 6 |
| | | | coiled-coil domains 1-like | |
| 96 | 23635 | SSBP2 | single-stranded DNA binding protein 2 | Group 6 |
| 97 | 6612 | SUMO3 | small ubiquitin-like modifier 3 | Group 6 |
| 98 | 84260 | TCHP | trichoplein, keratin filament binding | Group 6 |
| 99 | 9804 | TOMM20 | translocase of outer mitochondrial | Group 6 |
| | | | membrane 20 homolog (yeast) | |
| 100 | 55850 | USE1 | unconventional SNARE in the ER 1 homolog | Group 6 |
| | | | (S. cerevisiae) | |
| 101 | 89891 | WDR34 | WD repeat domain 34 | Group 6 |
| 102 | 54521 | WDR44 | WD repeat domain 44 | Group 6 |
| 103 | 23036 | ZNF292 | zinc finger protein 292 | Group 6 |
| 104 | 6234 | RPS28 | ribosomal protein S28 | Group 6 |

TABLE 2
3 Markers for early diagnosis of RA and
identification of MTX therapy failure

| | | | | early RA (HitHard) | | |
|---|---|---|---|---|---|---|
| | | | Gene | | Fold- | Sens. (%) at |
| No. | Group | gene ID | Symbol | p-value | change | 90% spec. |
| 1 | Group 1 | 64753 | CCDC136 | 0.031 | 1.7 | 14 |
| 2 | Group 1 | 3281 | HSBP1 | 0.002 | 1.3 | 25 |
| 3 | Group 1 | 3485 | IGFBP2 | 0.0004 | 1.5 | 19 |

[0110] Table 2 contains 3 antigens which are particularly suitable for identifying RA patients who are ACPA-negative and likely will not benefit from MTX basic therapy.

TABLE 3
51 markers for controlling MTX therapy

| | | | | PLAC/ | PLAC/ | Therapy |
|---|---|---|---|---|---|---|
| | | | Gene | MTX | MTX fold | manage- |
| No. | Group | GeneID | Symbol | p-value | change | ment |
| 1 | Group 1 | 64753 | CCDC136 | 0.050 | −5.15 | NR |
| 2 | Group 1 | 3281 | HSBP1 | 0.004 | −2.15 | NR |
| 3 | Group 1 | 3485 | IGFBP2 | 0.025 | −1.65 | NR |
| 4 | Group 5 | 10476 | ATP5H | 0.021 | −2.14 | NR |
| 5 | Group 5 | 7812 | CSDE1 | 0.037 | −1.96 | NR |
| 6 | Group 5 | 1485 | CTAG1B | 0.013 | −1.54 | NR |
| 7 | Group 5 | 8320 | EOMES | 0.023 | −2.58 | NR |
| 8 | Group 5 | 10961 | ERP29 | 0.018 | −1.57 | NR |
| 9 | Group 5 | 84893 | FBXO18 | 0.006 | −1.50 | NR |
| 10 | Group 5 | 3059 | HCLS1 | 0.019 | −3.02 | NR |
| 11 | Group 5 | 3182 | HNRNPAB | 0.001 | −2.43 | NR |
| 12 | Group 5 | 3798 | KIF5A | 0.003 | −1.76 | NR |
| 13 | Group 5 | 8079 | MLF2 | 0.042 | −1.58 | NR |
| 14 | Group 5 | 60560 | MAK10 | 0.018 | −1.54 | NR |
| 15 | Group 5 | 8473 | OGT | 0.025 | −1.55 | NR |
| 16 | Group 5 | 5174 | PDZK1 | 0.023 | −2.24 | NR |
| 17 | Group 5 | 23645 | PPP1R15A | 0.007 | −1.82 | NR |
| 18 | Group 5 | 64062 | RBM26 | 0.016 | −2.13 | NR |
| 19 | Group 5 | 23170 | TTLL12 | 0.020 | −2.92 | NR |
| 20 | Group 5 | 91544 | UBXN11 | 0.004 | −1.77 | NR |
| 21 | Group 5 | 6944 | VPS72 | 0.030 | −1.87 | NR |
| 22 | Group 5 | 163033 | ZNF579 | 0.016 | −2.09 | NR |
| 23 | Group 5 | 23625 | FAM89B | 0.013 | −1.70 | NR |
| 24 | Group 5 | 27344 | PCSK1N | 0.005 | −2.99 | NR |
| 25 | Group 5 | 64762 | FAM59A | 0.026 | −3.45 | NR |
| 26 | Group 5 | 30 | ACAA1 | 0.034 | 2.59 | R |
| 27 | Group 5 | 11093 | ADAMTS13 | 0.011 | 1.61 | R |
| 28 | Group 5 | 204 | AK2 | 0.025 | 1.87 | R |
| 29 | Group 5 | 211 | ALAS1 | 0.007 | 3.64 | R |
| 30 | Group 5 | 90416 | C15orf57 | 0.031 | 1.69 | R |
| 31 | Group 5 | 51531 | C9orf156 | 0.008 | 1.69 | R |
| 32 | Group 5 | 1108 | CHD4 | 0.028 | 1.95 | R |
| 33 | Group 5 | 22982 | DIP2C | 0.012 | 1.58 | R |
| 34 | Group 5 | 9454 | HOMER3 | 0.019 | 1.87 | R |
| 35 | Group 5 | 3490 | IGFBP7 | 0.021 | 1.98 | R |
| 36 | Group 5 | 10445 | MCRS1 | 0.015 | 1.54 | R |
| 37 | Group 5 | 112950 | MED8 | 0.031 | 1.91 | R |
| 38 | Group 5 | 65003 | MRPL11 | 0.003 | 4.15 | R |
| 39 | Group 5 | 7469 | WHSC2 | 0.035 | 1.73 | R |
| 40 | Group 5 | 84081 | CCDC55 | 0.039 | 1.82 | R |
| 41 | Group 5 | 81572 | PDRG1 | 0.013 | 2.16 | R |
| 42 | Group 5 | 5494 | PPM1A | 0.039 | 1.75 | R |
| 43 | Group 5 | 5536 | PPP5C | 0.005 | 1.98 | R |
| 44 | Group 5 | 9727 | RAB11FIP3 | 0.033 | 1.81 | R |
| 45 | Group 5 | 10111 | RAD50 | 0.012 | 2.55 | R |
| 46 | Group 5 | 6449 | SGTA | 0.004 | 2.49 | R |
| 47 | Group 5 | 116841 | SNAP47 | 0.041 | 1.59 | R |
| 48 | Group 5 | 10290 | SPEG | 0.013 | 2.15 | R |
| 49 | Group 5 | 10422 | UBAC1 | 0.007 | 2.16 | R |
| 50 | Group 5 | 65109 | UPF3B | 0.020 | 2.13 | R |
| 51 | Group 5 | 8882 | ZNF259 | 0.021 | 1.56 | R |

NR: marker increased in the case of MTX therapy resistance (therapy non-responder)
R: marker increased in the case of MTX therapy response (therapy responder patients)

TABLE 4
53 markers for controlling anti-TNF inhibitor therapy

| | | | | | ADA/ | ADA/ |
|---|---|---|---|---|---|---|
| | | | | ADA/ | MTX | MTX |
| | | | Gene | MTX | fold- | therapy |
| No. | Group | GeneID | Symbol | p-value | change | management |
| 52 | Group 6 | 39 | ACAT2 | 0.029 | −1.80 | NR |
| 53 | Group 6 | 348 | APOE | 0.020 | 1.90 | R |
| 54 | Group 6 | 128061 | C1orf131 | 0.013 | 2.16 | R |
| 55 | Group 6 | 79714 | CCDC51 | 0.042 | −2.36 | NR |
| 56 | Group 6 | 6249 | CLIP1 | 0.036 | −1.53 | NR |
| 57 | Group 6 | 30827 | CXXC1 | 0.020 | 1.58 | R |
| 58 | Group 6 | 9704 | DHX34 | 0.010 | −1.77 | NR |
| 59 | Group 6 | 57572 | DOCK6 | 0.011 | −1.69 | NR |
| 60 | Group 6 | 84444 | DOT1L | 0.010 | −2.04 | NR |
| 61 | Group 6 | 23301 | EHBP1 | 0.031 | 1.62 | R |
| 62 | Group 6 | 8661 | EIF3A | 0.009 | 1.71 | R |
| 63 | Group 6 | 1982 | EIF4G2 | 0.039 | −2.20 | NR |
| 64 | Group 6 | 63877 | C10orf84 | 0.020 | −2.01 | NR |
| 65 | Group 6 | 54865 | GPATCH4 | 0.003 | 2.36 | R |
| 66 | Group 6 | 2922 | GRP | 0.039 | −1.80 | NR |
| 67 | Group 6 | 84064 | HDHD2 | 0.010 | −1.65 | NR |
| 68 | Group 6 | 80895 | ILKAP | 0.018 | 1.61 | R |
| 69 | Group 6 | 23479 | ISCU | 0.040 | 1.58 | R |
| 70 | Group 6 | 57498 | KIDINS220 | 0.011 | −1.72 | NR |
| 71 | Group 6 | 3875 | KRT18 | 0.018 | −1.63 | NR |
| 72 | Group 6 | 29094 | HSPC159 | 0.011 | −1.94 | NR |
| 73 | Group 6 | 79888 | LPCAT1 | 0.025 | −2.10 | NR |
| 74 | Group 6 | 4357 | MPST | 0.002 | 2.94 | R |
| 75 | Group 6 | 10528 | NOP56 | 0.034 | 1.50 | R |
| 76 | Group 6 | 51602 | NOP58 | 0.000 | 2.21 | R |
| 77 | Group 6 | 9315 | C5orf13 | 0.004 | 1.60 | R |
| 78 | Group 6 | 23762 | OSBP2 | 0.021 | −1.87 | NR |
| 79 | Group 6 | 55593 | OTUD5 | 0.021 | −1.74 | NR |
| 80 | Group 6 | 79668 | PARP8 | 0.015 | −1.95 | NR |
| 81 | Group 6 | 23089 | PEG10 | 0.016 | 2.09 | R |
| 82 | Group 6 | 9360 | PPIG | 0.035 | 1.66 | R |
| 83 | Group 6 | 84687 | PPP1R9B | 0.044 | 1.73 | R |
| 84 | Group 6 | 5589 | PRKCSH | 0.005 | −2.54 | NR |
| 85 | Group 6 | 5834 | PYGB | 0.021 | −1.57 | NR |
| 86 | Group 6 | 117584 | RFFL | 0.014 | −1.94 | NR |
| 87 | Group 6 | 9025 | RNF8 | 0.032 | −1.54 | NR |
| 88 | Group 6 | 6091 | ROBO1 | 0.005 | 2.14 | R |
| 89 | Group 6 | 6240 | RRM1 | 0.023 | −1.68 | NR |
| 90 | Group 6 | 22937 | SCAP | 0.041 | −1.64 | NR |
| 91 | Group 6 | 23256 | SCFD1 | 0.005 | 2.39 | R |
| 92 | Group 6 | 6382 | SDC1 | 0.007 | −2.15 | NR |
| 93 | Group 6 | 10483 | SEC23B | 0.018 | −2.13 | NR |
| 94 | Group 6 | 6576 | SLC25A1 | 0.031 | −3.58 | NR |
| 95 | Group 6 | 92521 | CYTSB | 0.017 | −2.91 | NR |
| 96 | Group 6 | 23635 | SSBP2 | 0.021 | −2.44 | NR |
| 97 | Group 6 | 6612 | SUMO3 | 0.014 | −1.62 | NR |
| 98 | Group 6 | 84260 | TCHP | 0.026 | −1.68 | NR |
| 99 | Group 6 | 9804 | TOMM20 | 0.021 | 1.97 | R |
| 100 | Group 6 | 55850 | USE1 | 0.046 | −1.64 | NR |
| 101 | Group 6 | 89891 | WDR34 | 0.019 | −1.71 | NR |
| 102 | Group 6 | 54521 | WDR44 | 0.007 | 2.18 | R |
| 103 | Group 6 | 23036 | ZNF292 | 0.003 | 2.85 | R |
| 104 | Group 6 | 6234 | RPS28 | 0.028 | −1.55 | NR |

NR: marker increased in the case of ADA/MTX combination therapy resistance (therapy non-responder)
R: marker increased in the case of ADA/MTX combination therapy response (therapy responder patients)

### EXAMPLES

### Example 1: Modelling for Discrimination of Therapy Responders and Non-Responders by Means of PLS

[0111] Based on EULAR/ACR guidelines for the treatment of RA patients, the main objective is to achieve a remission of the RA by means of suitable therapy. This is often defined as the attainment of a DAS28 value of <2.6. If this is not possible, the lowest possible level of disease activity should be achieved.

[0112] In a first step, a partial least square (PLS) regression model was created. By means of what is known as a PLS score plot, it is possible to visualise whether it is possible with use of the selected antigens to distinguish between what are known as therapy responder patients and non-responder patients. All antigens from Table 1 were used initially for the modelling, and the autoantigen body mirror of all serum samples was analysed at the time TO before therapy was started.

[0113] FIG. 1 shows a PLS score plot for all antigens from Table 1 and the autoantibody measured values thereof. FIG. 1 shows that the separation of patients who are reaching or missing the therapy target of remission before therapy is started is possible in principle. Antigens for supporting various therapy approaches can thus be specified from Table 1.

### Example 2: Calculation of Antigen Panels for Predicting the Response to MTX Monotherapy

[0114] On account of the clinical and serological heterogeneity of the RA disease, it is not possible with just one biomarker to predict the response to MTX therapy for all RA patients. It is therefore necessary to combine as many uncorrelated autoantigens as possible to form what are known as biomarker panels.

[0115] Group 5 of the antigens in Table 3 comprises the most important 51 antigens which are used for the calculation of biomarker panels for MTX therapy management.

[0116] Group 5 contains 26 antigens, that is to say autoantibody reactivities (antigens) which can be measured in RA patients: ACAA1, ADAMTS13, AK2, ALAS1, C15orf57, C9orf156, CHD4, DIP2C, HOMER3, IGFBP7, MCRS1, MED8, MRPL11, WHSC2, CCDC55, PDRG1, PPM1A, PPP5C, RAB11FIP3, RAD50, SGTA, SNAP47, SPEG, UBAC1, UPF3B, ZNF259. From these 26 antigens, antigens can be selected which supplement one another particularly well as markers in smaller panels. Panel 1 in Table 5 contains a combination of 11 markers which can be used selectively to identify patients who will likely respond to MTX therapy.

[0117] For the generation of panels, antigens were selected, based on the univariant results, that had a p-value for the non-parametric mean value comparison of the serum samples prior to the start of therapy between RA patients who, after 24 weeks of treatment with MTX, responded and did not respond to the therapy. A p-value of <0.05 and at the same time a different median distribution of 1.5 between the two groups were used as a basis. For the 52 antigens cited in Table 3, an L1-penalised logistic regression model was created. Antigens which were not taken into consideration within the scope of the modelling were removed from any further consideration.

[0118] As summarised in Table 5, an AUC of 0.9 with a mean sensitivity of 98% and a mean specificity of 72% was achieved with 11 markers of panel 1. FIG. 2 shows the ROC for panel 1.

### Example 3: Calculation of Antigen Panels for Predicting MTX Therapy Resistance

[0119] Group 5 in Table 3 contains 26 autoantibody reactivities (antigens) which can be measured in RA patients who likely will not respond to MTX therapy: CCDC136, HSBP1, IGFBP2, ATP5H, CSDE1, CTAG1B, EOMES, ERP29, FBXOl8, HCLS1, HNRNPAB, KIF5A, MLF2, MAK10, OGT, PDZK1, PPP1R15A, RBM26, TTLL12, UBXN11, VPS72, ZNF579, FAM89B, PCSK1N, FAM59A.

[0120] From these 26 antigens, antigens can be selected which supplement one another particularly well as markers in smaller panels. Panel 1 in Table 5 contains a combination of 10 markers which can be used selectively to identify patients who likely will not respond to MTX therapy.

[0121] Table 5 shows different combinations of antigens which can be used for the calculation of the biomarker panels for MTX therapy management.

TABLE 5
Antigens and biomarker panels for MTX therapy-management

| Marker | Antigen | | Therapy | | | |
|---|---|---|---|---|---|---|
| No. | Symbol | Panel | management | ABC | Sens. | Spec. |
| 43 | PPP5C | 1 | MTX therapy | 0.9 | 0.89 | 0.72 |
| 38 | MRPL11 | | response | | | |
| 31 | TRMO | | | | | |
| 45 | RAD50 | | | | | |
| 27 | ADAMTS13 | | | | | |
| 33 | DIP2C | | | | | |
| 32 | CHD4 | | | | | |
| 29 | ALAS1 | | | | | |
| 51 | ZPR1 | | | | | |
| 41 | PDRG1 | | | | | |
| 37 | MED8 | | | | | |
| 11 | HNRNPAB | 2 | MTX therapy | 0.88 | 0.82 | 0.9 |
| 18 | RBM26 | | resistance | | | |
| 20 | UBXN11 | | | | | |
| 23 | FAM89B | | | | | |
| 19 | TTLL12 | | | | | |
| 17 | PPP1R15A | | | | | |
| 25 | GAREM | | | | | |
| 12 | KIF5A | | | | | |
| 10 | HCLS1 | | | | | |
| 22 | ZNF579 | | | | | |

[0122] For panel 2 it has been shown by way of example that what are known as therapy failures can be identified with a mean AUC of 0.88 and a sensitivity of 82% with a specificity of 90%.

[0123] FIG. 2 shows the sensitivity and specificity, and the area under the curve (AUC) for panel 1 and panel 2.

### Example 4: Calculation of Antigen Panels for Predicting Therapeutic Success Following Treatment with Anti-TNF Inhibitors

[0124] Group 6 in Table 4 contains 20 autoantibody responses (antigens) which can be measured in RA patients that will likely respond to anti-TNF alpha inhibitor therapy: APOE, Clorf131, CXXC1, EHBP1, EIF3A, GPATCH4, ILKAP, ISCU, MPST, NOP56, NOP58, C5orf13, PEG10, PPIG, PPP1R9B, ROBO1, SCFD1, TOMM20, WDR44, ZNF292

[0125] 20 antigens can be selected from group 6 which supplement one another particularly well as markers in smaller panels. Panel 3 in Table 5 contains a combination of 11 markers which can be used selectively to identify patients that likely will not respond to MTX therapy.

[0126] Table 6 shows different combinations of antigens which can be used for the calculation of the biomarker panels for ADA/MTX therapy management.

TABLE 6
Antigens and biomarker panels
for ADA/MTX therapy-management

| Marker | Antigen | | Therapy | | | |
|---|---|---|---|---|---|---|
| No. | Symbol | Panel | management | AUC | Sens. | Spec. |
| 76 | NOP58 | 3 | ADA/MTX therapy | 0.82 | 0.79 | 0.78 |
| 91 | SCFD1 | | response | | | |
| 74 | MPST | | | | | |
| 68 | ILKAP | | | | | |
| 88 | ROBO1 | | | | | |
| 69 | ISCU | | | | | |
| 61 | EHBP1 | | | | | |
| 83 | PPP1R9B | | | | | |
| 103 | ZNF292 | | | | | |
| 99 | TOMM20 | | | | | |
| 54 | C1orf131 | | | | | |
| 95 | SPECC1L | 4 | ADA/MTX therapy | 0.95 | 0.88 | 0.89 |
| 93 | SEC23B | | resistance | | | |
| 67 | HDHD2 | | | | | |
| 56 | CLIP1 | | | | | |
| 101 | WDR34 | | | | | |
| 63 | EIF4G2 | | | | | |
| 96 | SSBP2 | | | | | |
| 90 | SCAP | | | | | |
| 85 | PYGB | | | | | |
| 59 | DOCK6 | | | | | |
| 86 | RFFL | | | | | |
| 97 | SUMO3 | | | | | |

[0127] For panel 3 it has been shown by way of example that patients who will likely respond to ADA/MTX combination therapy can be identified with a mean AUC of 0.82 and a sensitivity of 79% with a specificity of 78%.

[0128] FIG. 3 shows the sensitivity and specificity, and the area under the curve (AUC) for panel 3 and panel 4.

### Example 5: Calculation of Antigen Panels for Predicting Therapy Failure Following Treatment with Anti-TNF Inhibitors

[0129] Group 6 in Table 4 contains 33 autoantibody responses (antigens) which can be measured in RA patients who likely will not respond to anti-TNF alpha inhibitor therapy: ACAT2, CCDC51, CLIP1, DHX34, DOCK6, DOT1L, EIF4G2, C10orf84, GRP, HDHD2, KIDINS220, KRT18, HSPC159, LPCAT1, OSBP2, OTUDS, PARP8, PRKCSH, PYGB, RFFL, RNF8, RRM1, SCAP, SDC1, SEC23B, SLC25A1, CYTSB, SSBP2, SUMO3, TCHP, USE1, WDR34, RPS28

[0130] 33 antigens can be selected from group 6 which supplement one another particularly well as markers in smaller panels. Panel 4 in Table 6 contains a combination of 12 markers which can be used selectively to identify patients who likely will not respond to ADA/MTX therapy and therefore should be treated using an alternative biological DMARD.

[0131] For panel 4 it has been shown by way of example that what are known as ADA/MTX therapy failures can be identified with a mean AUC of 0.95 and a sensitivity of 88% with a specificity of 89%.

[0132] FIG. 3 shows the sensitivity and specificity, as well as the area under the curve (AUC) for panel 4.

### LITERATURE

[0133] Aletaha, D., T. Neogi, et al. (2010). “2010 Rheumatoid arthritis classification criteria: an American College of Rheumatology/European League Against Rheumatism collaborative initiative.” Ann Rheum Dis 69(9): 1580-1588.
[0134] Detert, J., H. Bastian, et al. (2013). “Induction therapy with adalimumab plus methotrexate for 24 weeks followed by methotrexate monotherapy up to week 48 versus methotrexate therapy alone for DMARD-naïve patients with early rheumatoid arthritis: HIT HARD, an investigator-initiated study.” Ann Rheum Dis 72(6): 844-850.
[0135] Hueber, W., B. Tomooka, et al. (2009). “Blood autoantibody and cytokine profiles predict response to anti-tumor necrosis factor therapy in rheumatoid arthritis.” Arthritis Res Ther 11(3): R76.
[0136] Smolen, J. S., R. Landewd, et al. (2010). “EULAR recommendations for the management of rheumatoid arthritis with synthetic and biological disease-modifying antirheumatic drugs.” Ann Rheum Dis 69(6): 964-975.
[0137] Somers, K., P. Geusens, et al. (2011). “Novel autoantibody markers for early and seronegative rheumatoid arthritis.” J Autoimmun 36(1): 33-46.

The application's sequence listing, which the Patent Office published only in electronic form, follows.

SEQUENCE LISTING (208 sequences)

SEQ ID NO: 1 - DNA, 1729 bp, Homo sapiens
cctccctgcgcacccggctcgggtccccgggctcgcggctgcggcttctgctcagggaggcggaaggcggcggcgggagcggtcatggaggcgggcgccggagccggcgcgggagccgcgggctggagctgcccgggcccaggacccacagtgaccactctaggctcctatgaggcttccgagggctgtgagaggaagaagggccaacgctgggggtccctggaacgacgggggatgcaagctatggagggggaggtgttactcccagctctctatgaggaggaagaggaagaggaagaggaggaagaagaggtggaagaagaagaagaacaagtgcagaaaggtggcagtgttggctctctgtcagtcaacaagcaccggggactgagcctcacggagacagagctggaggagctgcgggctcaggtgctgcagctggtggcagaactggaggagacccgggaactggcagggcagcatgaggatgactccttggagctacaggggctcctggaggatgaacggctagccagcgcccagcaggcagaggtgttcaccaagcagatccagcagctccaaggtgagctgcgttctctacgggaggagatttccctgttagagcatgagaaagaaagcgaacttaaggaaatagaacaggaattgcatttggcccaggctgagatccagagtctgcggcaagcagcagaggattccgcaactgaacatgagagtgacatagcatccctgcaggaggatctctgccggatgcagaatgaacttgaagacatggaacgcattcggggagattatgagatggagatcgcctccctccgtgcagaaatggaaatgaagagctctgaaccatccgaagaactgcaggagctgcgggaacgctaccatttcctgaatgaggaataccgggccctgcaggagagcaacagcagcctcacggggcagcttgcagatctggagagtgagaggacacagagagcaacagagagatggctgcagtcccaaacactgagtatgacgtcagcagagtctcagacttcagaaatggatttcttagagcctgatcctgaaatgcagttgttacggcagcagctacgggatgctgaagagcagatgcatggcatgaagaacaagtgtcaggaattgtgttgtgagttggaagagctacagcatcatcgccaggtcagtgaggaggagcagaggcggctgcagagggagctcaagtgtgctcagaatgaggtgcttcggtttcagacctcccacagtgtcacccagtcatcccctacccccaatccccccatcttctccttgcctcttgtaggcctggtggtcatctcggctttgctctggtgctggtgggctgagacgtcgtcctaatgcagaacatgtttgggttgtggaagcctatggtattcttggctattgcagctgtggctctgtatgtgttacccaacatgcgacagcaggagtcagagttctgcctcatggagtgatggcagaccttggccagcgcgagggcagatccccagtggccaccaccctcagctttgggcaggacacactgtgccagaaccctccccatatgttccatgtgtccccatctcctcagcctcagtcacccaggctgaaaaggcttgtggggagcggctgacttccatctcctgccttgtgtaagaacctgagttccttgtaattaaatatcaactgaattacatga

SEQ ID NO: 2 - DNA, 1989 bp, Homo sapiens
gcgcgcggcctcgaggcccttccggtgcgggagaaactactactcccataatgccccgcggtcccgcgagctgccagtctcgtcgcgagaagcagcggcccggggcgactgagcggacaaacggaagtgtaggttacggtctgagacatcaccgccaagctgggcatcggggagatggccgagactgaccccaagaccgtgcaggacctcacctcggtggtgcagacactcctgcagcagatgcaagataaatttcagaccatgtctgaccagatcattgggagaattgatgatatgagtagtcgcattgatgatctggaaaagaatatcgcggacctcatgacacaggctggggtggaagaactggaaagtgaaaacaagatacctgccacgcaaaagagttgaaggttgctaataatttatactggaatctggcatttttccaagccaagagaagatcgaatggctttttgcagctaactactatgtgtagacaggttttatattataaagtatgcattcttatcacctagtatatagttagtttgtagagtgatttccccccagtttcttgaacatggtatcttcacatcttggaccttggtcagttgtgctattcattattaaacactaaaactttggcggttcttgcataacattgtcagattttttagtgtatttctgtgaagtcattttttttcttgtcattccttttgtagtagttgctgtttggataaaagttgatgtgtgattttttattaaacaaatagtaaacccttcaattatagttagtcttggtgaagtaagatgtttgtagactttagagttctttaattcttggcacaacgtgactgttgagctaacaccaaatagtgtgttggcaatacttttcaaatggctgaaaacacctaaaaattgttcattcagaaatatctgtcactgctctgttgccaaaactcagaatagaacttagacgtatgtctgagtccctgagatcacatgctaaagtcgatgaaaagtaaccactgccactgtcttgtgtcagaacttttacagtacagaaaataacagaatagccttctgtaatgaggcgtttgttagagttttgcatgagattctaatacttcagtaggaccctacctacgtggttcatctacaatggttaccataaaaaatctggcaggattttaaaactcaatcagtctttcctttgagctagtgacttgaaaagaaagagagaaggaaaagagaccatattaagtccatgccagttgcttggctagaatatgatcaacgacttgtagtagactcaagtttttaaaaaacactattttacttaaactgtttcttatctaaattcttgcagagtgtcaatgttatcattgattatagaagacagggataatacctttatctctggccactcaaaaatgcagtgccaggagtgctaaacctagaggccaatactgatgacctggaaggtgatccatatgattgtcaccacaaagtgcttttacacaaaaacttgaaaatttgaaaaacatgatttttttaagtttctcatctcaccagtcttggtgtttatattgcaaatctatcaaagtaagaaataatttgtgctgtatacaaattacatggggaacataaaggagtgagatccttctgtgataaaatgaattcaccactctggttacccaactacagaacctcctttgatcaggccagtaggttgtgatgcaggctggagcccccgaatgccccacacacactgcagcattgaccagaccatccgaaacctgcgtccctggtgatgttctcaagcctcggaagtggcaaatggaaatgatatggccggttgcggttgtaggagagttgtgacttaggcaggagtcgacctcctcaagtaatggaacgatttcaaaggcaggctgccctgaccaaaaatatctgccatgaataaaggtgcctgaaatcctgctatgaagcttc

SEQ ID NO: 3 - DNA, 1439 bp, Homo sapiens
tgcggcggcgagggaggaggaagaagcggaggaggcggctcccgcgctcgcagggccgtgccacctgcccgcccgcccgctcgctcgctcgcccgccgcgccgcgctgccgaccgccagcatgctgccgagagtgggctgccccgcgctgccgctgccgccgccgccgctgctgccgctgctgccgctgctgctgctgctactgggcgcgagtggcggcggcggcggggcgcgcgcggaggtgctgttccgctgcccgccctgcacacccgagcgcctggccgcctgcgggcccccgccggttgcgccgcccgccgcggtggccgcagtggccggaggcgcccgcatgccatgcgcggagctcgtccgggagccgggctgcggctgctgctcggtgtgcgcccggctggagggcgaggcgtgcggcgtctacaccccgcgctgcggccaggggctgcgctgctatccccacccgggctccgagctgcccctgcaggcgctggtcatgggcgagggcacttgtgagaagcgccgggacgccgagtatggcgccagcccggagcaggttgcagacaatggcgatgaccactcagaaggaggcctggtggagaaccacgtggacagcaccatgaacatgttgggcgggggaggcagtgctggccggaagcccctcaagtcgggtatgaaggagctggccgtgttccgggagaaggtcactgagcagcaccggcagatgggcaagggtggcaagcatcaccttggcctggaggagcccaagaagctgcgaccaccccctgccaggactccctgccaacaggaactggaccaggtcctggagcggatctccaccatgcgccttccggatgagcggggccctctggagcacctctactccctgcacatccccaactgtgacaagcatggcctgtacaacctcaaacagtgcaagatgtctctgaacgggcagcgtggggagtgctggtgtgtgaaccccaacaccgggaagctgatccagggagcccccaccatccggggggaccccgagtgtcatctcttctacaatgagcagcaggaggctcgcggggtgcacacccagcggatgcagtagaccgcagccagccggtgcctggcgcccctgccccccgcccctctccaaacaccggcagaaaacggagagtgcttgggtggtgggtgctggaggattttccagttctgacacacgtatttatatttggaaagagaccagcaccgagctcggcacctccccggcctctctcttcccagctgcagatgccacacctgctccttcttgctttccccgggggaggaagggggttgtggtcggggagctggggtacaggtttggggagggggaagagaaatttttatttttgaacccctgtgtcccttttgcataagattaaaggaaggaaaagtaaa

SEQ ID NO: 4 - DNA, 628 bp, Homo sapiens
tgacccacttccgttacttgctgcggaggaccgtgggcagccagggtcggtgaaggatcccaaaatggctgggcgaaaacttgctctaaaaaccattgactgggtagcttttgcagagatcataccccagaaccaaaaggccattgctagttccctgaaatcctggaatgagaccctcacctccaggttggctgctttacctgagaatccaccagctatcgactgggcttactacaaggccaatgtggccaaggctggcttggtggatgactttgagaagaagtttaatgcgctgaaggttcccgtgccagaggataaatatactgcccaggtggatgccgaagaaaaagaagatgtgaaatcttgtgctgagtgggtgtctctctcaaaggccaggattgtagaatatgagaaagagatggagaagatgaagaacttaattccatttgatcagatgaccattgaggacttgaatgaagctttcccagaaaccaaattagacaagaaaaagtatccctattggcctcaccaaccaattgagaatttataaaattgagtccaggaggaagctctggcccttgtattacacattctggacattaaaaataataattatacagttaaaaaa

SEQ ID NO: 5 - DNA, 4090 bp, Homo sapiens
tcactccgccccttctcgtgcacgcgcccggagcccgcaactctcgcgagagaagcgagatttattcctacgtaccgggccgtgctgcttatggcggcgctggagagggggcgctgagctgttgggtatgaagtgtaacagaacagactttaccacctgaaactgctgcttcaagttcagatcaggcaaggaacaaacctcgtaacaactaacaagaccaaagaagagtacacttaagttgaagacacaacacttgatctgaaacaagaagtttgtgcctactcaacagctttgaaagagcacttcccaacgctgctagtagtctttgttttcttcagtgctgtactgtgagattgcccggtacagcagcagttgtattctttattagcttggtagatcattttctctcgctcttttttttaatactagcaactttcatcctttgaaacgtgtgctgaaaaagaagaatcagcaaatactactgaaagtgcaatatttgagtatcactgcgagatgagctttgatccaaaccttctccacaacaatggacataatgggtaccctaatggtacttcagcagcactgcgtgaaactggggttattgaaaaactgttaacctcttacggatttattcagtgttcagaacgtcaagctagacttttcttccactgttcacagtataatggcaacctgcaagacttaaaagtaggagatgatgttgaatttgaagtatcatcggaccgacggactgggaaacccattgctgttaaactggtgaagataaaacaagaaatcctccctgaagaacgaatgaatggacaagaagtgttttatctgacttacacccctgaagatgtcgaagggaacgttcagctggaaactggagataaaataaactttgtaattgataacaataaacatactggtgctgtaagtgctcgcaacattatgctgttgaaaaagaaacaagcccgctgtcagggagtagtttgtgccatgaaggaggcatttggctttattgaaagaggtgatgttgtaaaagagatattctttcactatagtgaatttaagggtgacttagaaaccttacagcctggcgatgatgtggaattcacaatcaaggacagaaatggtaaagaagttgcaacagatgtcagactattgcctcaaggaacagtcatttttgaagatatcagcattgaacattttgaaggaactgtaaccaaagttatcccaaaagtacccagtaaaaaccagaatgacccattgccaggacgcatcaaagttgactttgtgatccctaaagaacttccctttggagacaaagatacgaaatccaaggtgaccctgctggaaggtgaccatgttaggtttaatatttcaacagaccgacgtgacaaattagagcgagcaaccaatatagaagttctgtcaaatacatttcagttcactaatgaagcccgagaaatgggtgtgattgctgccatgagagatggttttggtttcatcaagtgtgtggatcgtgatgttcgtatgttcttccacttcagtgaaattctggatgggaaccagctccatattgcagatgaagtagagtttactgtggttcctgatatgctctctgctcaaagaaatcatgctattaggattaaaaaacttcccaagggcacggtttcatttcattcccattcagatcaccgttttctgggcacggtagaaaaagaagccactttttccaatcctaaaaccactagcccaaataaaggcaaagagaaggaggctgaggatggcattattgcttatgatgactgtggggtgaaactgactattgcttttcaagccaaggatgtggaaggatctacttctcctcaaataggagataaggttgaatttagtattagtgacaaacagaggcctggacagcaggttgcaacttgtgtgcgacttttaggtcgtaattctaactccaagaggctcttgggttatgtggcaactctgaaggataattttggatttattgaaacagccaatcatgataaggaaatctttttccattacagtgagttctctggtgatgttgatagcctggaactgggggacatggtcgagtatagcttgtccaaaggcaaaggcaacaaagtcagtgcagaaaaagtgaacaaaacacactcagtgaatggcattactgaggaagctgatcccaccatttactctggcaaagtaattcgccccctgaggagtgttgatccaacacagactgagtaccaaggaatgattgagattgtggaggagggcgatatgaaaggtgaggtctatccatttggcatcgttgggatggccaacaaaggggattgcctgcagaaaggggagagcgtcaagttccaattgtgtgtcctgggccaaaatgcacaaactatggcttacaacatcacacccctgcgcagggccacagtggaatgtgtgaaagatcagtttggcttcattaactatgaagtaggagatagcaagaagctctttttccatgtgaaagaagttcaggatggcattgagctacaggcaggagatgaggtggagttctcagtgattcttaatcagcgcactggcaagtgcagcgcctgtaatgtttggcgagtctgtgagggccccaaggctgttgcagctcctcgacctgatcggttggtcaatcgcttgaagaatatcactctggatgatgccagtgctcctcgcctaatggttcttcgtcagccaaggggaccagataactcaatggggtttggtgcagaaagaaagatccgtcaagctggtgtcattgactaaccacatccacaaagcacaccattaatccactatgatcaagttggggggaatctggtgaagggttctgaatatctccctcttcatccctcccgaaatctggaatacttattctattgagctattacaccagttttaacaccttcctcgtgttatgtttaaaaaaataaataaatttaagaaaaccattttaaataatgcacagttgcagcctggaaaaacttaaggtggcgccttatagtatcaattttaggagctttatttggtgcatttaacgcaactggtaattgcagaatccactttgcctgtgtaagtgaaaaatatagactgttatcttgttggccctatgaaattctgcacttttcattatatactctaccttcattaattacttctggcaagatgttctgccttagcactcagttgcattcttttcctttttcttcctgttcattatgctttaattctgaggaccatatgagggtagaatatattatcttttaaaaattacaaaaatttgtataggcaaaccatttcttaaagttgatggccaaattttaaaatgttatttttcatatcatttataatcttgtcacaatccacttaaagaagtttggttatatttcagtgaaaattttcttccagagtaggttttttttcgtgggttggggggtaactttactacaattagtaagtatggtgcagaatttcatgcaaatgaggagtgccagcagtgtgataatttaaacatatttaaacaaaaacaaaaaaaatgaatgcacaaacttgctgctgcttagatcactgcagcttctaggacccggtttcttttactgatttaaaaacaaaacaaaaaaaaataaaaaagttgtgcctgaaatgaatcttgtttttttttataagtagccgcctggttactgtgtcctgtaaaatacagacacttgacccttggtgtagcttctgttcaactttatatcacgggaatggatgggtctgatttcttggccctcttcttgaattggccatatacagggtccctggccagtggactgaaggctttgtctaagatgacaagggtcagctcaggggatgtgggggagggcggttttatcttcccccttgtcgtttgaggttttgatctctgggtaaagaggccgtttatctttgtaaacacgaaacatttttgctttctccagttttctgttaatggcgaaagaatggaagcgaataaagttttactgatttttgagacactagcaaaaaaaaaaaaaaaaaa

SEQ ID NO: 6 - DNA, 752 bp, Homo sapiens
atcctcgtgggccctgaccttctctctgagagccgggcagaggctccggagccatgcaggccgaaggccggggcacagggggttcgacgggcgatgctgatggcccaggaggccctggcattcctgatggcccagggggcaatgctggcggcccaggagaggcgggtgccacgggcggcagaggtccccggggcgcaggggcagcaagggcctcggggccgggaggaggcgccccgcggggtccgcatggcggcgcggcttcagggctgaatggatgctgcagatgcggggccagggggccggagagccgcctgcttgagttctacctcgccatgcctttcgcgacacccatggaagcagagctggcccgcaggagcctggcccaggatgccccaccgcttcccgtgccaggggtgcttctgaaggagttcactgtgtccggcaacatactgactatccgactgactgctgcagaccaccgccaactgcagctctccatcagctcctgtctccagcagctttccctgttgatgtggatcacgcagtgctttctgcccgtgtttttggctcagcctccctcagggcagaggcgctaagcccagcctggcgccccttcctaggtcatgcctcctcccctagggaatggtcccagcacgagtggccagttcattgtgggggcctgattgtttgtcgctggaggaggacggcttacatgtttgtttctgtagaaaataaaactgagctacgaaaaa

SEQ ID NO: 7 - DNA, 3674 bp, Homo sapiens
aagtttccaagtggtcaacttgaccgatgctttggcaattgaaaaagggcagaaaggcgcgggctagtgggtggatggggacaaagatctaagtcaccttcttccagcgtgtgagcctgggaggagggtgggggtcctgaggagcaagaggtacgaggaaggaaaaggagagggcttctgggttagtttccacctcctgctttccaactcacggcgctttccttccggaaaggacgctggattcagggcgcgccagtacgcgcagtagcggcccgcgagtcggcaggtgggtagccccggcgcgggaggaaggggaagttaccttcccctcggaagagggcgctggctcccccatcctgcctttataataaggccaccggaggagaggaagcagccagctgccgtctgcgctttgcaaagcatgcagttaggggagcagctcttggtgagctcagtgaacctgcctggcgcgcacttctacccgctggagagtgcgcgaggcggcagcggcgggagcgctggccacctccccagcgcggccccctctcctcagaagttggacttagacaaagcgtccaagaagttttccggcagtctctcctgcgaggcggtgagcggggagcccgcagccgccagcgcaggggcccccgcggccatgcttagtgacaccgacgccggggacgcatttgccagcgctgcggcagtggccaagccggggcccccggacggccgcaagggctccccctgcggggaggaggagctgccctccgccgctgcagccgccgccgccgccgccgccgcggctgcggccactgcgcgctactccatggacagcctgagctccgagcggtactacctccagtcccccggtcctcaggggtcggagctggctgcgccctgctcactcttcccgtaccaggcggcggctggggcgccccacggacctgtgtacccggctcctaacggggcgcgctacccctacggctccatgctgccccccggcggcttccccgcggctgtgtgcccacccgggagggcgcagttcggcccaggagccggtgcgggcagtggcgcgggcggtagcagcggcgggggcggcggcccgggcacctatcagtacagccagggggctccgctctacgggccgtaccctggagccgcagcggcgggatcttgcggaggactggggggcctgggggttccaggttctggcttccgtgcccacgtctacctgtgcaaccggcctctgtggctcaaattccaccgccaccaaactgagatgatcattacgaaacagggcaggcgcatgtttcctttcttgagcttcaacataaacggactcaatcccactgcccactacaatgtgttcgtagaggtggtgctggcggaccccaaccactggcgcttccaggggggcaaatgggtgacctgtggcaaagccgacaataacatgcagggcaacaaaatgtatgttcacccagagtctcctaatactggttcccactggatgagacaggagatttcattcgggaaattaaaactcaccaataacaaaggcgcaaataacaacaacacccagatgatagtcttacaatccttacacaaataccaaccccgactgcatattgttgaagttacagaggatggcgtggaggacttgaatgagccctcaaagacccagacttttaccttctcagaaacgcaattcattgcagtgactgcctaccaaaacaccgatattactcaactaaagattgatcataacccctttgcaaaaggcttcagagacaactatgattccatgtacaccgcttcagaaaatgacaggttaactccatctcccacggattctcctagatcccatcagattgtccctggaggtcggtacggcgttcaatccttcttcccggagccctttgtcaacactttacctcaagcccgctattataatggcgagagaaccgtgccacagaccaacggcctcctttcaccccaacagagcgaagaggtggccaaccctccccagcggtggcttgtcacgcctgtccagcaacctgggaccaacaaactagacatcagttcctatgaatctgaatatacttctagcacattgctcccatatggcattaaatccttgccccttcagacatcccatgccctggggtattacccagacccaacctttcctgcaatggcagggtggggaggtcgaggttcttaccagaggaagatggcagctggactaccatggacctccagaacaagccccactgtgttctctgaagatcagctctccaaggagaaagtgaaagaggaaattggctcttcttggatagagacacccccttccatcaaatctctagattccaatgattcaggagtatacaccagtgcttgtaagcgaaggcggctgtctcctagcaactccagtaatgaaaattcaccctccataaagtgtgaggacattaatgctgaagagtatagtaaagacacctcaaaaggcatgggagggtattatgctttttacacaactccctaaagagttattttaacctcaaaaattagctaactttttgcagatggacttggtggtgttttttgttgtcttctttgcctaggttgccaaaaagatgtttgccttccaccttgatgcatcctgttttgtgcaattctctaaaagaaggtgccaaagctttttgattgctgcaggtaactgaaacaaacctagcatttttaaaaaataagattaatggaagactttaaggtattttaaaattcgaagggtatccaaggttctgtatttatttattggggagacactaacccttcaaagaagcaggctgtgaacattgggtgcccagtgctatcagatgagttaaaacctttgattctcatttctatttgtaaattcttaagcaaatagaagccgagtgttaaggtgttttgcttctgaaagagggctgtgccttccgtttcagaaggagacattttgctgttacattctgccaggggcaaaagatactaggcccaggagtcaagaaaagcttttgtgaaagtgatagtttcacctgactttgattccttaacccccggcttttggaacaagccatgtttgccctagtccaggattgcctcacttgagacttgctaggcctctgctgtgtgctggggtggccagtgggactcaggagagagcaagctaaggagtcaccaaaaaaaaaaaaaaaaaaaagggagaatttaaaagtgtacagttgtgtgtttagatacactatagaataatgtggtatatattgtacaaatagtctacataggtgtctgggataatgtaaaactggtgctttggctttgtaaagaatttgcaaatcacttaacagctgcaggggcaaggggagagtttcatcatccccatgatatttgggaatattctgtttacttcttagatagttaagaatgtattcagctactatgtactaacttgaaccgtgtttaaggaaaactcctatttcatcctcttcttgcgccatcccctctccctaacttggtaatgtgaagaaactaaaacctgataccacagctcctataggcattttagagatcttggatttttatgtacagtcttagtcatttttaataaatgtggttcagtaagggaacggaaaaaaaaaaaaaaa

SEQ ID NO: 8 - DNA, 1472 bp, Homo sapiens
gagcctcctggggtgtccacgtgagcgcgcgtgagtccgcccccccagtcacgtgaccgctgactcggggcgttctccactatcgcttacctacctccctctgcaggaacccggcgatatggctgccgctgtgccccgcgccgcatttctctccccgctgcttccccttctcctgggcttcctgctcctctccgctccgcatggcggcagcggcctgcacaccaagggcgcccttcccctggatacggtcactttctacaaggtcattcccaaaagcaagttcgtcttggtgaagttcgacacccagtacccctacggtgagaagcaggatgagttcaagcgtcttgctgaaaactcggcttccagcgatgatctcttggtggcagaggtggggatctcagattatggtgacaagctgaacatggagctgagtgagaaatacaagctggacaaagagagctacccagtcttctacctcttccgggatggggactttgagaacccagtcccatacactggggcagttaaggttggagccatccagcgctggctgaaggggcaaggggtctacctaggtatgcctggttgcctgcctgtatacgacgccctggccggggagttcatcagggcctctggtgtggaggcccgccaggccctcttgaagcaggggcaagataacctctcaagtgtgaaggagactcagaagaagtgggccgagcaatacctgaagatcatggggaagatcttagaccaaggggaggacttcccagcatcagagatgacacggatcgccaggctgattgagaagaacaagatgagtgacgggaagaaggaggagctccagaagagcttaaacatcctgactgccttccagaagaagggggccgagaaagaggagctgtaaaaaggctgtctgtgattttccagggtttggtgggggtagggaggggagagttaacctgctggctgtgagtcccttgtggaatataagggggtagtgggaaaagtggtactaacccacgattctgagccctgagtatgcctggacattgatgctaacatgaccatgcttgggatgtctctagctggtctggggatagctggagcacttactcaggtggctggtgaaatgacacctcagaaggaatgagtgctatagagaggagagaggagtgtactgcccaggtctttgacagatgtaattctcattcaattaaagtttcagtgttttggttaagtggacctgaagccattcttttttcttttcaaattatactttcgtctatgacctgctttcctctttgaatctaagctggtatagactccactttcccagggtaacaaactatcctcataacactgtggaaactggcatacctttgttattttccagtgatattcagactgacatggattgactgtcaatggtaaagtttgtctattttccagtccttaaaactcaatagcagtat

SEQ ID NO: 9 - DNA, 3702 bp, Homo sapiens
ggagctcgcggaggaagtcggcgggcgtctcgggctccaggtcccggccagaggaggagctcgctgccgggggacgctgggctgagcggccggcggcgcgggcccggcggcggcggcagcggggtccgggtccggagcgccacatctgtggtccgaagacaaccctatgaggcatcagtagggttttacaggtggggaagtggaggcctaaccaagtcagtgactttcttacagaattacagtgagacggtttaagcggaagcatcttactgccattgactgccagcatttggctcggagtcacttggctgtgacccagcccttcggtcaaagatggacaaacagagatccgaaccatggtctctatcctaaaccgagaacaaaaagagggagtaggggtcagggaagtcaaagatgcatccctgagttcttcctagcaggcaagcagccgtgcaccaatgacatggccaaaagcaattctgttggccaggacagctgtcaggactctgagggtgacatgatctttcctgcagagagcagctgtgcactgcctcaggaaggcagtgcagggccgggctcaccagggtctgccccgccctccaggaagcggtcttggtcctctgaggaagagagtaaccaggctaccgggaccagccggtgggatggagtttctaagaaagctccacggcaccatttgtctgtgccatgcacaaggcctagggaggccaggcaagaagcagaggacagtacgtctcggctctctgcggagtctggtgaaaccgaccaagatgctggggacgtgggtcctgatcccattcctgactcatactatgggcttcttgggaccttgccctgccaggaagcactgagccacatttgcagcctgcctagtgaggtcctgaggcacgtgtttgccttcctcccggtggaagacctctattggaacctgagcttggtgtgccacttgtggagggagatcatcagtgacccgctgttcattccttggaagaagctgtaccatcgatacctgatgaatgaagagcaagctgtcagcaaagtggacggcatcctgtctaactgtggcatagaaaaggagtcagacctgtgtgtgctgaacctcatacgatacacagccaccactaagtgctctccgagtgtggatcccgagagggtgctgtggagtctgagggaccaccccctcctccccgaggctgaggcgtgtgtgcggcaacacctccccgacctctacgctgctgccgggggtgtcaacatctgggccctggtggcggctgtggtgctcctctccagcagtgtgaatgacatccagcgactgctcttctgcctccggagacccagctccacggtgaccatgccagatgtcaccgagaccctgtactgcatagccgtgcttctctacgccatgagggagaaggggattaacatcagcaataggattcactacaacattttctattgcctatatcttcaggagaattcctgcactcaggccacaaaagttaaagaggagccatctgtctggccaggcaagaaaaccatccaacttacacatgaacaacagctgattctgaatcacaagatggaacctctccaggtggtgaaaattatggcctttgccggcactgggaagacctcaacgctggtcaagtatgcagagaagtggtctcagagcaggtttctgtatgtgacattcaacaagagcatcgcaaagcaggccgaacgcgtcttccccagcaacgtcatctgcaaaaccttccactccatggcctacgggcacatagggcggaagtaccagtcaaagaagaagttgaatctcttcaagttaacacccttcatggtcaactccgtccttgctgaagggaagggtggattcataagagccaagcttgtgtgtaagactctagaaaacttctttgcctcggctgacgaagagctgaccattgatcacgtgcctatttggtgtaagaacagccaaggacagagagtcatggttgagcagagtgaaaaactgaatggtgtccttgaagcgagccgcctctgggataacatgcggaagctgggggagtgcacagaagaggcgcaccagatgactcatgacggctacttgaaactctggcagctgagcaagccttcgctggcctcttttgacgccatctttgtggatgaggcccaggactgcacaccagctatcatgaacatagttctgtctcagccatgtgggaaaatctttgtaggggacccgcaccagcagatctataccttccggggtgcggtcaacgccctgttcacagtgccccacacccacgtcttctatctcacgcagagttttcggtttggtgtggaaatagcttatgtgggagctactatcttggatgtttgcaagagagtcaggaaaaagactttggttggaggaaaccatcagagtggcattagaggtgacgcaaaggggcaagtggccttgttgtcccggaccaacgccaacgtgtttgatgaggccgtacgggtgacggaaggggaattcccttcaaggatacatttgattggggggattaaatcatttggattggacagaatcattgatatttggatccttcttcagccagaggaagaacggaggaaacaaaacctcgtcattaaagacaaatttatcagaagatgggtgcacaaagaaggctttagtggcttcaagaggtatgtgaccgctgccgaggacaaggagcttgaagccaagatcgcagttgttgaaaagtataacatcaggattccagagctggtgcaaaggatagaaaaatgccatatagaagatttggactttgcagagtacattctgggcactgtgcacaaagccaaaggcctggagtttgacactgtgcatgttttggatgattttgtgaaagtgccttgtgcccggcataacctgccccagcttccgcacttcagagttgagtcattttctgaggatgaatggaatttactgtatgttgcagtaactcgagccaagaagcgtctcatcatgaccaaatcattggaaaacattttgactttggctggggagtacttcttgcaagcagagctgacaagcaacgtcttaaaaacaggcgtggtgcgctgctgcgtgggacagtgcaacaatgccatccctgttgacaccgtccttaccatgaagaagctgcccatcacctatagcaacaggaaggaaaacaaggggggctacctctgccactcctgtgcggagcagcgcatcgggcccctggcgttcctgacagcctccccggagcaggtgcgcgccatggagcgcactgtggagaacatcgtactgccccggcatgaggccctgctcttcctcgtcttctgaggacaaggcgcacgttctccgcagtgcagagcagcttgccgaggaccccgcgtgaagaaagccagcgaggggggcttctgctccctgagactctgggttcacccacagcactttctgaggaagaggacaccagcccaagctggacctgccatttctccactccctacagacagccagtctccacttgcctcccctctggatgtatctggtcagggaagtgggggatgttcttttgataaaaaaaaaaaaaaaaatttatgtatttaaacttttattacaagatttcaattaaacaggcaccatagcactggcataaaaaaaaaaaaaaa

SEQ ID NO: 10 - DNA, 1943 bp, Homo sapiens
tgacgaaaacctgaatacggaactgaagcagcagctcagtttctcactccgaagtggcagcagccagagagggagtcggtgtggacgcgaggagccgggcgcttagaacagaggcttgcacaggtggagatgtggaagtctgtagtgggccatgatgtgtctgtttccgtggagacccagggtgatgattgggacacagatcctgactttgtgaatgacatctctgaaaaggagcaacgatggggagccaagaccatcgaggggtctggacgcacagaacacatcaacatccaccagctgaggaacaaagtatcagaggagcatgatgttctcaggaagaaagagatggagtcagggcccaaagcatcccatggctatggaggtcggtttggagtagaaagagaccgaatggacaagagtgcagtgggccatgagtatgttgccgaggtggagaagcactcttctcagacggatgctgccaaaggctttgggggcaagtacggagttgagagggacagggcagacaagtcagcagtcggctttgattataaaggagaagtggagaagcacacatctcagaaagattatgccaagggctttggtggccagtatggaatccagaaggaccgagtggataagagcgctgtcggcttcaatgaaatggaggccccgaccacagcttataagaagacgacgcccatagaagccgcttctagtggtacccgtgggctgaaggcgaaatttgagtccatggctgaggagaagaggaagcgagaggaagaggagaaggcacagcaggtggccaggaggcaacaggagcgaaaggctgtgacaaagaggagccctgaggctccacagccagtgatagctatggaagagccagcagtaccggccccactgcccaagaaaatctcctcagaggcctggcctccagttgggactcctccatcatcagagtctgagcctgtgagaaccagcagggaacacccagtgcccttgctgcccattaggcagactctcccggaggacaatgaggagcccccagctctgccccctaggactctggaaggcctccaggtggaggaagagccagtgtacgaagcagagcctgagcctgagcccgagcctgagcccgagcctgagaatgactatgaggacgttgaggagatggacaggcatgagcaggaggatgaaccagagggggactatgaggaggtgctcgagcctgaagattcttctttttcttctgctctggctggatcatcaggctgcccggctggggctggggctggggctgtggctctggggatctcagctgtggctctatatgattaccaaggagagggaagtgatgagctttcctttgatccggacgacgtaatcactgacattgagatggtggacgagggctggtggcggggacgttgccatggccactttggactcttccctgcaaattatgtcaagcttctggagtgactagagctcactgtctactgcaactgtgatttcccatgtccaaagtggctctgcctccaccccctccctattcctgctgcaaatgtctaaccagatgaggttctggacagacttccctctcctgcttcattaagggcttggggcagagacagcatggggaaggaggtccccttccccaagagtcctctctatcctggatgagctcatgaacatttctcttgtgttcctgactccttcccaatgaacacctctctgccaccccaagctctgctctcctcctctgtgagctctgggcttcccagtttgtttacccgggaaagtacgtctagattgtgtggtttgcctcattgtgctatttgcccactttccttccctgaagaaatatctgaaccttctttctgttcagtcctaaaattcgaaataaagtgagactatggttcacctgtataaaaaaaaaaaaaaaa

SEQ ID NO: 11 - DNA, 1696 bp, Homo sapiens
aaagggcgccacgagtcggcattgtcaggcggcggcaccgcgcgggacggagcttggctgttggtcggtgggttcccgtgcggcggcggccaaggaggaggagacacagttggagcagctccgtgggctgactggggcgaggcctcagcagcgcgagcttgagtgcggccgagcctgcggcgccttcccctgcgggtggggacgagcgggccccgcggcgtcatcggcggcgaggagccgccgcgcctcggcctagcatgtcggaagcgggcgaggagcagcccatggagacgacgggcgccaccgagaacggacatgaggccgtccccgaaggcgagtcgccggccggggctggcacgggcgccgcggcgggggctggaggcgcgaccgcggcgcccccgagcgggaatcagaacggcgccgagggcgaccagatcaacgccagcaagaacgaggaggacgcgggaaaaatgttcgttggtggcctgagctgggatactagcaaaaaagatttaaaagactattttactaaatttggagaggtcgttgactgtacaataaaaatggatcccaacactggacggtcaagagggtttgggtttatcctgttcaaagatgcagccagtgtggagaaggtcctagaccagaaggagcacaggctggatggccgtgtcattgaccctaaaaaggccatggctatgaagaaggacccggtgaagaaaatcttcgttgggggtctgaatcctgaagccactgaggaaaagatcagggagtactttggcgagtttggggagattgaggccattgaattgccaatggatccaaagttgaacaaaagacgaggttttgtgtttatcacctttaaagaagaagaacccgtgaagaaggttctggagaaaaagttccatactgtcagtggaagcaagtgtgagatcaaggtggcccagcccaaagaagtctatcagcagcagcagtatggctctgggggccgtggaaaccgcaaccgagggaaccgaggcagcggaggtggtggtggaggtggaggtcagggtagtacaaactacggcaagagccagcgacgtggtggccatcagaataactacaagccatactgaggcggcagcaggagcgaccaactgatcgcacacatgctttgtttggatatggagtgaacacaattatgtaccaaatttaacttggcaaactttctattgcctgtcccatgtgcatcttatttaaaatttcccccatggaaatcactctcctgttgactatttccagagctctaggtgtttaggcagcgtgtggtgtctgagaggccatagcgccatcatgggctgatttttattaccaggtcccccagaagcaggtgggaggctctgcttcctgctgccgctctgcagcctggacctgtggaccctggttgtaaagagtaaattgtatcttaggaaaccagtgtcacctttttttcaccttttaattttatattatttgcgtcatacatttcctgtaacggaagtgttaattttactgtactttttggtaccttttgggaatctaatgtattgtaaggtattttacacgtgtcctgattttgccacaacctggatattgaagctatccaagcttttgaaataaaatttaaaaacccccaagcctgggtgagtgtgggataaaaaaaaaaaaaaaaaaaaaa

SEQ ID NO: 12 - DNA, 3897 bp, Homo sapiens
acgcccaggtcgcccgcatcccgctgccgcaggagagagacagcgcgccccggccctgctccccaggcttcgcccgggcgccctcaactctgtccccagagactgagcacctgtcctccgcctcggcctctgctgagagccctctcctctggagcacacaccacccctgcagcccaagaagagtcccagccccacgccggctaccaccatggcggagaccaacaacgaatgtagcatcaaggtgctctgccgattccggcccctgaaccaggctgagattctgcggggagacaagttcatccccattttccaaggggacgacagcgtcgttattggggggaagccatatgtttttgaccgtgtattccccccaaacacgactcaagagcaagtttatcatgcatgtgccatgcagattgtcaaagatgtccttgctggctacaatggcaccatttttgcttatggacagacatcctcagggaaaacacataccatggagggaaagctgcacgaccctcagctgatgggaatcattcctcgaattgcccgagacatcttcaaccacatctactccatggatgagaaccttgagttccacatcaaggtttcttactttgaaatttacctggacaaaattcgtgaccttctggatgtgaccaagacaaatctgtccgtgcacgaggacaagaaccgggtgccatttgtcaagggttgtactgaacgctttgtgtccagcccggaggagattctggatgtgattgatgaagggaaatcaaatcgtcatgtggctgtcaccaacatgaatgaacacagctctcggagccacagcatcttcctcatcaacatcaagcaggagaacatggaaacggagcagaagctcagtgggaagctgtatctggtggacctggcagggagtgagaaggtcagcaagactggagcagagggagccgtgctggacgaggcaaagaatatcaacaagtcactgtcagctctgggcaatgtgatctccgcactggctgagggcactaaaagctatgttccatatcgtgacagcaaaatgacaaggattctccaggactctctcgggggaaactgccggacgactatgttcatctgttgctcaccatccagttataatgatgcagagaccaagtccaccctgatgtttgggcagcgggcaaagaccattaagaacactgcctcagtaaatttggagttgactgctgagcagtggaagaagaaatatgagaaggagaaggagaagacaaaggcccagaaggagacgattgcgaagctggaggctgagctgagccggtggcgcaatggagagaatgtgcctgagacagagcgcctggctggggaggaggcagccctgggagccgagctctgtgaggagacccctgtgaatgacaactcatccatcgtggtgcgcatcgcgcccgaggagcggcagaaatacgaggaggagatccgccgtctctataagcagcttgacgacaaggatgatgaaatcaaccaacaaagccaactcatagagaagctcaagcagcaaatgctggaccaggaagagctgctggtgtccacccgaggagacaacgagaaggtccagcgggagctgagccacctgcaatcagagaacgatgccgctaaggatgaggtgaaggaagtgctgcaggccctggaggagctggctgtgaactatgaccagaagtcccaggaggtggaggagaagagccagcagaaccagcttctggtggatgagctgtctcagaaggtggccaccatgctgtccctggagtctgagttgcagcggctacaggaggtcagtggacaccagcgaaaacgaattgctgaggtgctgaacgggctgatgaaggatctgagcgagttcagtgtcattgtgggcaacggggagattaagctgccagtggagatcagtggggccatcgaggaggagttcactgtggcccgactctacatcagcaaaatcaaatcagaagtcaagtctgtggtcaagcggtgccggcagctggagaacctccaggtggagtgtcaccgcaagatggaagtgaccgggcgggagctctcatcctgccagctcctcatctctcagcatgaggccaagatccgctcgcttacggaatacatgcagagcgtggagctaaagaagcggcacctggaagagtcctatgactccttgagcgatgagctggccaagctccaggcccaggaaactgtgcatgaagtggccctgaaggacaaggagcctgacactcaggatgcagatgaagtgaagaaggctctggagctgcagatggagagtcaccgggaggcccatcaccggcagctggcccggctccgggacgagatcaacgagaagcagaagaccattgatgagctcaaagacctaaatcagaagctccagttagagctagagaagcttcaggctgactacgagaagctgaagagcgaagaacacgagaagagcaccaagctgcaggagctgacatttctgtacgagcgacatgagcagtccaagcaggacctcaagggtctggaggagacagttgcccgggaactccagaccctccacaaccttcgcaagctgttcgttcaagacgtcacgactcgagtcaagaaaagtgcagaaatggagcccgaagacagtggggggattcactcccaaaagcagaagatttcctttcttgagaacaacctggaacagcttacaaaggttcacaaacagctggtacgtgacaatgcagatctgcgttgtgagcttcctaaattggaaaaacgacttagggctacggctgagagagttaaggccctggagggtgcactgaaggaggccaaggagggcgccatgaaggacaagcgccggtaccagcaggaggtggaccgcatcaaggaggccgttcgctacaagagctcgggcaaacggggccattctgcccagattgccaaacccgtccggcctggccactacccagcatcctcacccaccaacccctatggcacccggagccctgagtgcatcagttacaccaacagcctcttccagaactaccagaatctctacctgcaggccacacccagctccacctcagatatgtactttgcaaactcctgtaccagcagtggagccacatcttctggcggccccttggcttcctaccagaaggccaacatggacaatggaaatgccacagatatcaatgacaataggagtgacctgccgtgtggctatgaggctgaggaccaggccaagcttttccctctccaccaagagacagcagccagctaatctcccacacccacggctgcatacctgcactttcagtttctaagagggactgaggcctcttctcagcatgctgcaaacctgtggtctctgatactaactccctccccaacccctgttgttggactgtactatgtttgatgtcttctcttacttactctgtatctctttgtactctgtatctatatatcaaaagctgctgctatgtctctcttctgtcttattctcaagtatctactgatgtatttagcaatttcaaagcatagtctaccttccttatttggggcaatagggaggagggtgaatgtttcttctttctcatctactcgtctcacactgagtggtgttagtcactgagtagaggtcacagagatgacaaaaggaaaaatgggagctagagggttgtgacccttcatacacacacgcacgcacgcacacaaacatgcacacacgcatgcacacacacaaagccttaagcagaagaatgtcttagcatcatgagacagagaaatagactcttcctccctcctctttcacatatagcacaggggaaggtaaaatggaagggctgctaattgagacatataattttc

SEQ ID NO: 13 - DNA, 1391 bp, Homo sapiens
agccccggacgggagcgggcccacggggctgcaggtgtggagccccctggagctgagatcaggatgttccgcttcatgagggacgtggagcctgaggatcccatgttcctgatggatccctttgctattcaccgtcagcatatgagccgtatgttgtcaggtggctttggatatagccccttcctcagcatcacagatggcaacatgccagggaccaggcctgccagccgccggatgcagcaggctggagctgtctccccctttgggatgctgggaatgtcgggtggtttcatggacatgtttgggatgatgaatgacatgattggaaacatggaacacatgacagctggaggcaattgccagaccttctcatcttccactgtcatctcctactccaatacgggtgatggtgcccccaaggtctaccaagagacatcagagatgcgctcggcaccaggcgggatccgggagacacggaggactgttcgggattcagacagtggactggagcagatgtccattgggcatcacatccgggacagggctcacatcctccagcgctcccgaaaccatcgcacgggggaccaggaggagcggcaggactatatcaacctggatgagagtgaggccgcagcgtttgatgacgagtggcggcgggagacctcccgattccggcagcagcgtcccctggagtttcggcggcttgagtcctcaggggctgggggacgaagggcggaggggcctccccgcctggccatccagggacctgaggactccccttcccgacagtcccgccgctatgactggtgagggccccgggccctcagcctctcttgtacaggctgagaggctgagaaatcatcccctgaataactttttcctctcgattcccatccccaatttaatattaaattaacaggcaagccggcccccacctctccctgggggtctcagggagaacctttcacggcaccctttccctaccttttccttctttaatctcctggtttaccattgatgacttcgcctctgcatctactgacttgatttttcattctgccactccatcttcaaaccccctcacctttcccatcctactcctgccatgcattgaagggtcaatgcattttggggtgagctctgggtttaggggccccctccatccctcagctaccctggatctttgcccacctcttcctcagagcccccactgaggggccgtagccctatctagggctgtggaaggagcagactggttcctaactctctccctcctcctgcccacacacatcaaaagaatcttccctacacccttctctgcctttattttttgatttgtgcaacttgtaactaggtgtttatggaataaaggagaatggaaaaaagaccaa

SEQ ID NO: 14 - DNA, 2657 bp, Homo sapiens
gggcatacgcatgcgtgcacgctgccggtcgggctgggctgagaggggagggggcggcggcggccgaggcggcgtcgttatttccgtggtccggacagtgcgtggcggcgcgggtgaccacgggagaagtaggcataatggttatgaaagcttctgtagatgatgacgattcaggatgggagctcagtatgccagaaaaaatggagaaaagcaatacaaactgggtggacattacccaagattttgaagaagcttgtcgagaattaaagttgggagaactacttcatgataagctatttggtctttttgaagccatgtctgctattgaaatgatggatcccaagatggatgctggcatgattggaaaccaagttaatcgaaaagttctcaattttgaacaagctatcaaggatggcactattaaaattaaagatctcaccttgcctgaactgatagggattatggatacatgtttttgctgtttgataacgtggttagaaggccattcactggcacagacagtatttacgtgcctttacattcataatccagactttatagaagatcctgctatgaaggcttttgctctgggaatcttgaaaatctgtgacattgcaagggaaaaagtaaataaagctgctgtttttgaagaggaagattttcagtcaatgacttatggatttaaaatggctaacagtgtgacagatcttcgagttacaggcatgctaaaagatgtggaggatgacatgcaaagaagagtaaagagtactcgaagtcgacaaggagaagaaagagatccagaagttgaactagaacaccaacaatgtttagcagtattcagcagagtgaaatttactcgtgtgttactgacagtgcttatagcctttactaagaaagagaccagtgctgttgcagaagctcaaaaattgatggttcaagcagcagatcttctttctgccattcataattcattgcatcatggcatccaggcccagaatgatactacaaaaggagatcatccaattatgatgggttttgaaccccttgtgaaccagaggctacttccacctaccttccctcgatatgcaaaaataattaaaagggaagaaatggtgaactattttgcaagattaatagatagaataaaaactgtctgtgaggttgtgaatttaacaaatttacattgtatcctggattttttctgtgaatttagtgaacagtcaccatgtgttctttcaagatctctgttacaaaccactttcctggtggataacaaaaaggtctttggaactcatctcatgcaagacatggtgaaagatgcacttcggtcttttgtcagtcctccggtgctttcccccaagtgctacctatataataatcaccaggctaaggactgtatcgactcctttgttactcactgtgttcggccattctgtagtcttattcagatccatggacataacagggctcgacagagagataagcttggtcatattcttgaggaatttgccaccttgcaggatgaggcagagaaggttgatgcagcgcttcacaccatgctgttgaaacaggaaccccaaaggcaacatttggcctgtttaggtacctgggtcctttaccataaccttcgcattatgatacagtaccttctaagtggctttgaattggaactctacagtatgcacgagtactattacatatattggtatctctctgaattcctttacgcatggttgatgtcaacattgagtcgtgccgatggctctcaaatggcagaggaaaggataatggaagagcagcagaaaggccgtagtagtaaaaaaacaaagaaaaaaaagaaagttcgcccattgagccgagagatcacaatgagccaagcatatcagaacatgtgtgctggaatgtttaaaaccatggtagcatttgacatggacggcaaagtacgtaaaccgaagtttgagcttgatagtgaacaagttcggtatgaacacaggtttgctccattcaacagtgtgatgaccccgccgccagtgcactacttacagttcaaggaaatgtctgacctcaataaatatagccctcctcctcagtctcctgaactgtatgtggcagctagtaagcactttcaacaggcaaaaatgatattggaaaatattcctaacccggaccatgaggttaatagaattttaaaggttgccaaacccaactttgtggttatgaagttattggcaggaggacacaaaaaggaatctaaagttcctcctgaatttgatttctctgctcataaatattttcctgttgtgaaacttgtttgagagagactggggaggtggccataaaggggcagagtcttctttcagacccaactcttagagggcacatcaccaggctccacatcacgggaagtgagatggatttcttgggtaacaactcattataaggaatacttttagtttgacagccttatatgacatgaatgaaaactgctgttttaaagtggtttattatgttccatggaagaaactggtcttattgaatgcattgatgaacgttatatggttttattacagatttaatcacaaatcattttttatgaatgattgagtgaaaatagtgtttataaaggttaataaatttcttgacaaaaaaaaaatgca

SEQ ID NO: 15 - DNA, 5467 bp, Homo sapiens
agttccggcccatgttgtttcggccgaggagccgtcgccgccatttcaagaccgtactaggtagatggtcaattagagttcccagggtttgaagcctgtaactgctgccgccgctcaagccctccagagcattgctacggctgctgcccttgtactactacctccaaatacgttcttgctggtagtggcggcagcaggaccaattacctcttttttgctctccctcgagaagctccagatggcgtcttccgtgggcaacgtggccgacagcacagggttagctgagttggcacatcgagaatatcaggcaggagattttgaggcagctgagagacactgcatgcagctctggagacaagagccagacaatactggtgtgcttttattactttcatctatacacttccagtgtcgaaggctggacagatctgctcactttagcactctggcaattaaacagaacccccttctggcagaagcttattcgaatttggggaatgtgtacaaggaaagagggcagttgcaggaggcaattgagcattatcgacatgcattgcgtctcaaacctgatttcatcgatggttatattaacctggcagccgccttggtagcagcgggtgacatggaaggggcagtacaagcttacgtctctgctcttcagtacaatcctgatttgtactgtgttcgcagtgacctggggaacctgctcaaagccctgggtcgcttggaagaagccaaggcatgttatttgaaagcaattgagacgcaaccgaactttgcagtagcttggagtaatcttggctgtgttttcaatgcacaaggggaaatttggcttgcaattcatcactttgaaaaggctgtcacccttgacccaaactttctggatgcttatatcaatttaggaaatgtcttgaaagaggcacgcatttttgacagagctgtggcagcttatcttcgtgccctaagtttgagtccaaatcacgcagtggtgcacggcaacctggcttgtgtatactatgagcaaggcctgatagatctggcaatagacacctacaggcgggctatcgaactacaaccacatttccctgatgcttactgcaacctagccaatgctctcaaagagaagggcagtgttgctgaagcagaagattgttataatacagctctccgtctgtgtcccacccatgcagactctctgaataacctagccaatatcaaacgagaacagggaaacattgaagaggcagttcgcttgtatcgtaaagcattagaagtcttcccagagtttgctgctgcccattcaaatttagcaagtgtactgcagcagcagggaaaactgcaggaagctctgatgcattataaggaggctattcgaatcagtcctacctttgctgatgcctactctaatatgggaaacactctaaaggagatgcaggatgttcagggagccttgcagtgttatacgcgtgccatccaaattaatcctgcatttgcagatgcacatagcaatctggcttccattcataaggattcagggaatattccagaagccatagcttcttaccgcacggctctgaaacttaagcctgattttcctgatgcttattgtaacttggctcattgcctgcagattgtctgtgattggacagactatgatgagcgaatgaagaagttggtcagtattgtggctgaccagttagagaagaataggttgccttctgtgcatcctcatcatagtatgctatatcctctttctcatggcttcaggaaggctattgctgagaggcacggcaacctgtgcttagataagattaatgttcttcataaaccaccatatgaacatccaaaagacttgaagctcagtgatggtcggctgcgtgtaggatatgtgagttccgactttgggaatcatcctacttctcaccttatgcagtctattccaggcatgcacaatcctgataaatttgaggtgttctgttatgccctgagcccagacgatggcacaaacttccgagtgaaggtgatggcagaagccaatcatttcattgatctttctcagattccatgcaatggaaaagcagctgatcgcatccatcaggatggaattcatatccttgtaaatatgaatggctatactaagggcgctcgaaatgagctttttgctctcaggccagctcctattcaggcaatgtggctgggataccctgggacgagtggtgcgcttttcatggattatattatcactgatcaggaaacttcgccagctgaagttgctgagcagtattccgagaaattggcttatatgccccacactttttttattggtgatcatgctaatatgttccctcacctgaagaaaaaagcagtcatcgattttaagtccaatgggcacatttatgacaatcggatagttctgaatggcatcgacctcaaagcatttcttgatagtctaccagatgtgaaaattgtcaagatgaagtgtcctgatggaggagacaatgcagatagcagtaacacagctcttaatatgcctgttattcctatgaatactattgcagaagcagttattgaaatgattaaccgaggacagattcaaataacaattaatggattcagtattagcaatggactggcaactactcagatcaacaataaggctgcaactggagaggaggttccccgtaccattattgtaaccacccgttctcagtacgggttaccagaagatgccatcgtatactgtaactttaatcagttgtataaaattgacccttctactttgcagatgtgggcaaacattctgaagcgtgttcccaatagtgtactctggctgttgcgttttccagcagtaggagaacctaatattcaacagtatgcacaaaacatgggcctgccccagaaccgtatcattttttcacctgttgctcctaaagaggaacacgtcaggagaggccagctggctgatgtctgcttggacactccactctgtaatgggcacaccacagggatggatgtcctctgggcagggacccccatggtgactatgccaggagagactcttgcttctcgagttgcagcatcccagctcacttgcttaggttgtcttgagcttattgctaaaaacagacaagaatatgaagacatagctgtgaagctgggaactgatctagaatacctgaagaaagttcgtggcaaagtctggaagcaaagaatatctagccctctgttcaacaccaaacaatacacaatggaactagagcggctctatctacagatgtgggagcattatgcagctggcaacaaacctgaccacatgattaagcctgttgaagtcactgagtcagcataaataaagactgcacaggagaattacccctatacctgagcctcaaccttctgggggaaagggaactagataacatacttcttacttgtctgtacagtaccttgttgcagatgggtgatatataatggtaatagaatagcacagccagacttgcttcctgcatggtagggagagacacaaaagatgggaaactgcttttccacaaggaatctccgtagaattttgcggcgaccagatggtgcataggtctggaaggtctgatctcccttggtcttccatgggatggttagtgtggaggggagatatagattgtccggccgctttgtgattccatggattgattcagtcttctggatttttttttctttatattttgggtactggagcttttaaaaatgtttggtttcaggtatttttattcatgtgaagtgtatatgattctcttgagataaggttttaagctaaaatgttactccctgttttagtttctgaactctgacagattgacagggactttgctggtgtagtctttttataggttttataaaccacttgagcctatatcagtcgttttagtgtctgacctaatatttggagctatcagtgctttgttgatttagatgatgactcaagattttttctggtccatttcccatttccttttcttccctgacccccataccctcacccttaaaattctcctgtaactcaactaacaaaatcaagcctgattcaaaacatcctagggtgttttaaacacaccatctggtgccaaatgaagatttttaggagtgattactaattatcaagggcacagttgtggtactgtcattgataataatatagtttttttttttttcctaattttgacctgtttcaccagtgttttacccttgactgccccttctatgctgcttccaaaagtgatagtgtgtgtaagatttttaccttcctttctaaagttttttttttttttttttaagtgagtcctgttcttcctatttctttcagcagaaatgaaatcccaggtaagtataagtattcaagtatttgatcagtaagtcacagttatctccagtgcattaaataaccttcatcaagaaataggttataggtaaaatctctgaaggatcatctatgtattcaagtaattattttttagataataactgtcttctggacttggtcttgaagtctgtacagattcagcctcagtagtagcgaactgcactgctgtttggtttggagtacaaattagacttatagtcctcctggaacttgagttattaaaatcataggaataaaattatgggatctcaacaaagggtcgagggtttgaggcttaaacaagccaacatatgaatatatgttttgtctcgctatactgcacttacgctatccagttgcaggtaattttttgtctgctagtagtgttctagattatgtctttccaaagcgctgaggctgtgcacctattctgtagttgcagctgatgcctgaatgtatcctagctgacaaattattgattaataagaacttgaatttctggaagattcttactgttaaccaaattttgagcaaggagtctcaaaggtaattctgaaccagaattacatgttaatgaacagtgtaccttttaacagtgtaaatcacggaatatccgtgaagggatttcttaatttattttttaccggttgattgaaatatcagttaaaggttgccagcatggttgcagataaactgatgtttgaaattcgctgaaatacttaatgtggaataggataatatacttccaatgccctcaaggctgtgaccttacagccattttacatagcacatcattcctcctatagggatgaactttttcctggcacgaaaagtagccgctctggttgaagctttgcttattgtaacaggcttttatttccaggtaatatgtcttggaagacttaattctgattagagatatagatattactggaaactaattgttttttttctattgtactctgctttatcaaagaagtaaaacatttaaatcgtactacagaaattaagatgttgtcttgcgatccttaataaatgaatgatttccctttaatacggaaaaaaaaaaaaaaa

SEQ ID NO: 16 - DNA, 1897 bp, Homo sapiens
tccagtgagttgcaagcctaatgctcacctgcagagacagaattcctgagtgaacgaacagagcagctcctcttccatctccagaaatgacctccaccttcaacccccgagaatgtaaactgtccaagcaagaagggcaaaactatggcttcttcctgcgaattgagaaggacaccgagggccacctggtccgggtggttgagaagtgtagcccagcagagaaggctggccttcaagatggagacagagttcttaggatcaatggtgtctttgtggacaaagaagaacatatgcaggttgtggatctggtcagaaagagtgggaattcagtgactttactagttctggatggggattcctatgagaaagcagtgaaaacacgggtggacttgaaagagttgggtcaaagtcagaaggagcaaggtttgagtgataatatactttcccctgtgatgaatggaggtgtgcaaacttggacccagccccggctctgctatctcgtgaaggaaggaggcagctatggcttctctctgaaaactgtccaaggtcaaatcatcaaggacatagattctggaagtccagcagaggaggctggcttgaagaacaatgatctggtagttgctgtcaacggcgagtctgtggaaaccctggatcatgacagtgtggtagaaatgattagaaagggtggagatcagacttcactgttggtggtagacaaagagacggacaacatgtacagactggctcatttttctccatttctctactatcaaagtcaagaactgcccaatggctctgtcaaggaggctccagctcctactcccacttctctggaagtctcaagtccaccagatactacagaggaagtagatcataagcctaaactctgcaggctggctaaaggtgaaaatggctatggctttcacttaaatgcgattcggggtctgccaggctcattcatcaaagaggtacagaagggcggtcctgctgacttggctgggctagaggatgaggatgtcatcattgaagtgaatggggtgaatgtgctagatgaaccctatgagaaggtggtggatagaatccagagcagtgggaagaatgtcacacttctagtctgtggaaagaaggcctatgattatttccaagctaagaaaatccctattgtttcctccctggctgatccacttgacacccctccagattctaaagaaggaatagtggtggagtcaaaccatgactcgcacatggcaaaagaacgggcccacagtacagcctcacattcttcttccaattctgaagatacagagatgtgatgaaaacaagtaatagctttggctgtttatttgatagctgtttctgggtatttaataggaatcctttctcaaggaatgagttgtgacctgtttactgtctctttagaagaaaaactccactggaaaccattcaccatgtgtgattgtcttctgttatcatttgtcttacaggcggctattgcagacggctaatttatgcttaacttaggaagagataaggcaagagctagatttttttcatgtgatcttttccaagcttcaacttaacttaactacatttctctgtatgatgatgtctcttacttctacaggttccttgagcaccaaagatgattcataactctgtataggtgacagctgcttataaaagcatcttagcagataagcctattaaaattgtgcttttgtaacaatgttgtggttgctagaataaataccattaacaaatgccttttgagtatgcttgatagtgcttttgttttggattcactttttatgctttaaccttcatttgcctctagaaacccaaaacacaataaagtacagaataagaccttagtaataaaattcagaattttcttaaa

SEQ ID NO: 17 - DNA, 2399 bp, Homo sapiens
ataaaagcctagtggccattgtgttcgttgctcttatcggttcccatcccagttgttgatcttatgcaagacgctgcacgaccccgcgcccgcttgtcgccacggcacttgaggcagccggagatactctgagttactcggagcccgacgcctgagggtgagatgaacgcgctggcctccctaaccgtccggacctgtgatcgcttctggcagaccgaaccggcgctcctgcccccggggtgacgcgcagctcccagccgcccagacacatggccccaggccaagcaccccatcaggctaccccgtggagggatgcccaccctttcttcctcctgtccccagtgatgggcctcctcagccgcgcctggagccgcctgaggggcctgggacctctagagccctggctggtggaagcagtaaaaggagcagctctggtagaagctggcctggagggagaagctaggactcctctggcaatcccccataccccttggggcagacgccctgaagaggaggctgaagacagtggaggccctggagaggacagagaaacactggggctgaaaaccagcagttcccttcctgaagcctggggacttttggatgatgatgatggcatgtatggtgagcgagaggcaaccagtgtccctagagggcagggaagtcaatttgcagatggccagcgtgctcccctgtctcccagccttctgataaggacactgcaaggttctgataagaacccaggggaggagaaagccgaggaagagggagttgctgaagaggagggagttaacaagttctcttatccaccatcacaccgggagtgttgtccagccgtggaggaggaggacgatgaagaagctgtaaagaaagaagctcacagaacctctacttctgccttgtctccaggatccaagcccagcacttgggtgtcttgcccaggggaggaagagaatcaagccacggaggataaaagaacagaaagaagtaaaggagccaggaagacctccgtgtccccccgatcttcaggctccgaccccaggtcctgggagtatcgttcaggagaggcgtccgaggagaaggaggaaaaggcacacaaagaaactgggaaaggagaagctgccccagggccgcaatcctcagccccagcccagaggccccagctcaagtcctggtggtgccaacccagtgatgaagaggagggtgaggtcaaggctttgggggcagctgagaaggatggagaagctgagtgtcctccctgcatccccccaccaagtgccttcctgaaggcctgggtgtattggccaggagaggacacagaggaagaggaagatgaggaagaagatgaggacagtgactctggatcagatgaggaagagggagaagctgaggcttcctcttccactcctgctacaggtgtcttcttgaagtcctgggtctatcagccaggagaggacacagaggaggaggaagatgaggacagtgatacaggatcagccgaggatgaaagagaagctgagacttctgcttccacaccccctgcaagtgctttcttgaaggcctgggtgtatcggccaggagaggacacggaggaggaggaagatgaggatgtggatagtgaggataaggaagatgattcagaagcagccttgggagaagctgagtcagacccacatccctcccacccggaccagagggcccacttcaggggctggggatatcgacctggaaaagagacagaggaagaggaagctgctgaggactggggagaagctgagccctgccccttccgagtggccatctatgtacctggagagaagccaccgcctccctgggctcctcctaggctgcccctccgactgcaaaggcggctcaagcgcccagaaacccctactcatgatccggaccctgagactcccctaaaggccagaaaggtgcgcttctccgagaaggtcactgtccatttcctggctgtctgggcagggccggcccaggccgcccgccagggcccctgggagcagcttgctcgggatcgcagccgcttcgcacgccgcatcacccaggcccaggaggagctgagcccctgcctcacccctgctgcccgggccagagcctgggcacgcctcaggaacccacctttagcccccatccctgccctcacccagaccttgccttcctcctctgtcccttcgtccccagtccagaccacgcccttgagccaagctgtggccacaccttcccgctcgtctgctgctgcagcggctgccctggacctcagtgggaggcgtggctgagaccaactggtttgcctataatttattaactatttattttttctaagtgtgggtttatataaggaataaagccttttgatttgtagcgaaaaaaaaaaaaaaaaa

SEQ ID NO: 18 - DNA, 5143 bp, Homo sapiens
gggggtgctgggagccgggaagaccccctgaatcgttcccattgagctgcccttcgccttcgctttctttacttttgccttttcgacgtagccaacaagcacctggtcccgaggctgagagaaggctcgggtctaagcgcgtgtcgcgcttccggtctgggtagatttgctggggaagagggaagggggagggcccgggcaaaccgttgctgtttcagcccgggctgggggccggggacggggagctcctggcaccccgtgcacttgtggcctgcggcggtccttgcagagctgttcgccgaccggggcccgcgggaacctgccaccggcgcctcccaccgcggcccacgcgggcggcgcgcggaggagggggcgggggcagcggcggctgtagcggccgcgacctgggcgggcggaggagtgtgacgggccttagggccgctgtggatggtttctaaaatgatcattgaaaacttcgaggcactcaagtcctggctcagcaagactctcgagcccatctgtgatgcagatccatccgccctagcaaaatatgttctggctttggtaaagaaagacaaaagtgaaaaagagttaaaggcattatgtattgatcagctggatgtatttcttcagaaagagacacagatatttgtggaaaaactttttgatgctgtgaatacaaagagttacctacctcctccagagcagccatcatcaggaagcctgaaggtagaattttttccacaccaagaaaaagatataaagaaggaagagatcactaaggaggaagagcgagagaagaagttttctagaaggctaaatcacagtcctccccagtcaagctcccgatacagggaaaatagaagccgtgatgagaggaaaaaagatgatcgttctcgcaaaagagattatgatcgaaaccctcctcgaagagattcatacagagaccggtacaatagaagacgagggcggagtcgcagttatagcaggagtcgaagtcgaagttggagtaaagagaggcttcgtgagagggacagagatagaagcaggactagaagcagaagcagaacacgaagcagggaaagggatctggtaaaacctaaatatgacctggatagaacagatccattagaaaataattatactccagtctcttcggtacctagtatttcatctggccactaccctgtacctactttgagcagcactattacagtaattgctcctactcatcatggaaacaacactaccgaaagttggtctgaatttcatgaagaccaagtggaccataactcttacgtaagaccacccatgccaaagaaacggtgtagagactatgatgaaaagggtttttgtatgagaggagacatgtgtccttttgatcatggaagtgatccagtagttgtagaagatgtgaatcttcctggtatgctgcctttcccagcacagcctcctgttgttgaaggaccacctcctcctggactccccccacctccaccaattcttacacccccacctgtgaatctcaggcccccagtaccaccgccaggtccattgccacccagtctcccacctgttacaggaccaccacctccacttcctcctttgcagccatctggcatggatgctcctccaaactctgcaaccagttctgttcctactgtagtaacaactggcattcatcaccagcctcctcctgctccaccctctctttttactgcagatacatatgacacagatggctacaatcctgaagccccaagcataacaaacacttccagacctatgtatagacacagagtgcatgcacaaaggcccaacttgataggactaacatcaggggatatggatttgccacccagagaaaagcctcccaataaaagcagtatgaggatagtagtggactcagaatcaaggaaaagaaccattggttctggagagcctggagttcctacaaagaagacttggtttgataaaccaaattttaatagaacaaacagcccaggctttcagaagaaggttcaatttggaaatgaaaataccaagcttgaacttagaaaagttcctccagaattaaataatatcagcaaacttaatgaacattttagtcgatttggaaccttggttaacttacaggttgcttataatggtgatcctgaaggtgccctaatccaatttgcaacatacgaagaagcaaagaaagcaatatcaagtacggaagcagtattaaacaatcgctttattaaggtttattggcacagagaaggaagcacccaacagttacaaactacttctccaaagcctttagtccagcagcccattttgcctgttgtgaagcagtcagtcaaagagcggctgggtccagtaccttcaagtactattgaacctgcagaagcccagagtgcctcttcagaccttcctcaggtgttgtctacatctactggcctaacaaaaacagtgtataatccagctgctttgaaggctgcacagaaaaccttacttgtttccacctctgcagttgataataatgaagcacagaaaaaaaaacaggaggcattgaaacttcagcaggatgtaaggaaaaggaaacaagaaattttagaaaagcacattgaaacacagaagatgttaatttcaaaactggagaaaaacaaaacaatgaagtctgaagataaagcagaaataatgaaaactttagaggttttgacaaaaaatattaccaagttgaaagatgaggtcaaagctgcttctcctggacgctgtcttccaaaaagtataaaaaccaagactcagatgcagaaggaattacttgacacagaactggatttatataagaagatgcaggctggagaagaagtcactgaacttaggagaaagtatacagaattacagctggaagctgccaaacgagggattctttcatctggtcggggcagaggaattcattcaagaggtcgaggtgcagttcatggccgaggcagggggcgagggcgagggcgaggtgtgcctggtcatgctgtggtggatcaccgtcccagggcattggagatttctgcatttacggagagcgatagagaagatcttcttcctcattttgcgcaatatggtgaaattgaagattgtcagattgatgattcctcacttcatgcagtaattacattcaagacaagagcagaagctgaagcagctgcagttcatggagctcgtttcaaagggcaagatctaaaactggcatggaataaaccagtaactaatatttcagctgttgaaacagaagaagttgagcctgatgaagaagaatttcaggaagagtctttggtggatgactcattacttcaagatgatgatgaagaagaagaggacaatgaatctcgttcttggagaagatgatttgactgatcattgatctgcatatgctagaactctacctgtgtttcattagtattatctaatgtacttttacatatttgtaaaaacaatttttggtaaaatgtgatgaagatggatttcacaaatagacaaaaaagaagaaaactaccttctgatcttgtattttgaaagattgatgtttgcattttacttcagtaaacaattgctaaagacatcacactagaaacatatgcaatgtttttattacatacttctactggacatcacagaattctttgggttctttgtaatttaatgaataggtctgaaaacttatgaccaatacttgttataacttagaggactttgttttattccaaataaggaatgaatttgcatttaaaatcttaatgaatgttttcaaaactgaatagataacatagtactctaactaaagtctccaagttatgtattataatattacatagtagtatgcttaggctttactatgtattagccttttgttggactgtgtatgtattttaccatatgggttttaatgataatggtgtatgactgctttacatgagtccttatgcatccagatgttataataaagtggaatggtctctttaaaaaaaaaaaaggaaagaaaagagaaaagcaatgacaaaaaaaaaaaaaaaaaaaaagccaagacaatgttccttgatttaaaaaaaaaaagaaaagaaaaaagaaaagaaaaaaattaaaatagaccattccagatggtgatctacccttccccccaattatcacaaaaggagctataatcactaacttattcttaataataatggttactggtacccttacaataatgtacaatccaatgtttaaaaattataccacttgagtttggtttgatcctataaattttcaacaaatgtcttaaaatttaaaagcaggctgattagtttggaaccagactgcaagtagagctaacatttggtgaataagaaaacatcacattacattttggatgtatgaaagaaaacttgaccatttgaagatatatgaataaagaaatgtactatagatactactttaggaaaacactgtttggtaagtgttccagtctgatattttaagtgtgtacttcctatacttgtataaaaatctttgatgtttgcaacaatactgtgatttttttaagtggatttcttttgcaagtgaacatgatcattgaaagttgatatggcagtttccaggaaataaatgcattctttgtagaatgggggtgggagattacatatttatattttcaaattcatcattttgattgcaagtgtttctgcctctcttgagattatagtgataatattaaaaaatcacatttaaaaaattactttcttccatattggggtcctcacaatcaaaagctgttgttccaccaccaccatagtcttctgccagtggagtaacttaaggatgctgttctttttcttcttccccatacacccctaattggggttgaagttgtgtgtattttcttgatggtaacactatttcatagaaatgctttgccttgcaattcgtgtctacgtttatatttaaaatttcaaaatcagatttcagttgtcaaaatagtgactttgctcaaaaagtcactatttttacttatatatttaaatcaaagatctatttttatgtagtctcttgtatgttgactatgtgctattctgattcattaggtaagtttgttttcttttctttttagtagtcgtgaaag

SEQ ID NO: 19 - DNA, 3421 bp, Homo sapiens
gccgacggacggcgggcggcggcggcggtggcggcgctggagtcggcgcgggtgctggcgccatggaggccgagcggggtcccgagcgccggcctgcggagcgtagcagcccgggccagacgccggaggagggcgcgcaggccttggccgagttcgcggcgctgcacggcccggcgctgcgcgcttcgggggtccccgaacgttactggggccgcctcctgcacaagctggagcacgaggttttcgacgctggggaagtgtttgggatcatgcaagtggaggaggtagaagaggaggaggacgaggcagcccgggaggtgcggaagcagcagcccaacccggggaacgagctgtgctacaaggtcatcgtgaccagggagagcgggctccaggcagcccaccccaacagcatcttcctcatcgaccacgcctggacgtgccgtgtggagcacgcgcgccagcagctgcagcaggtgcccgggctgctgcaccgcatggccaacctgatgggcattgagttccacggtgagctgcccagtacagaggctgtggccctggtgctggaggagatgtggaagttcaaccagacctaccagctggcccatgggacagctgaggagaagatgccggtgtggtatatcatggacgagttcggttcgcggatccagcacgcggacgtgcccagcttcgccacggcacccttcttctacatgccgcagcaggtggcctacacgctgctgtggcccctgagggacctggacactggcgaggaggtgacccgagactttgcctacggagagacggaccccctgatccggaagtgcatgctgctgccctgggcccccaccgacatgctggacctcagctcttgcacacccgagccgcccgccgagcactaccaggccattctggaggaaaacaaggagaagctgccacttgacatcaaccccgtggtgcacccccacggccacatcttcaaggtctacacggacgtgcagcaggtggccagcagcctcacccacccgcgcttcaccctcacccagagtgaggcggacgccgacatcctcttcaacttctcacacttcaaggactacaggaaactcagccaggagaggccaggcgtgctgctgaaccagttcccctgcgagaacctgctgactgtcaaggactgcctggcctccatcgcgcgccgggcaggtggccccgagggcccaccctggctgccccgaaccttcaacctgcgcactgagctgccccagtttgtcagctacttccagcagcgggaaaggtggggcgaggacaaccactggatctgcaagccctggaacctggcgcgcagcctggacacccacgtcaccaagagcctgcacagcatcatccggcaccgagagagcacccccaaggttgtgtccaagtacatcgaaagtcccgtgttgttccttcgagaagacgtgggaaaggtcaagttcgacatccgctacatcgtgctgctgcggtcagtgaggcccctacggttgttcgtgtatgatgtgttctggctgcggttctccaaccgggcctttgcactcaacgacctggatgactacgagaagcacttcacggtcatgaactatgacccggatgtggtgctgaagcaggtgcactgtgaagagttcatccccgagtttgagaagcaatacccagaatttccctggacggacgtccaggctgagatcttccgggccttcacggagctgttccaggtggcctgtgccaagccaccacccctgggcctctgcgactacccctcatcccgggccatgtatgccgtcgacctcatgctgaagtgggacaacggcccagatggaaggcgggtgatgcagccgcagatcctggaggtgaacttcaaccccgactgtgagcgagcctgcaggtaccaccccaccttcttcaacgacgtcttcagcaccttgtttctggaccagcccggtggctgccacgttacctgccttgtctaggcactcgctgtccccaaaacctgtgcttggggcaggattccaacctcagttctctgagctgcttctgcaaaggcccccatgtccctccccacaccggccctgggcatagcctcagccccaggcctctgtcctgccgagccatcctcccggcgccacactccgggagcacagcatcctcctctcacctgtgggtcagagcaggacagtgatggtgtccccagggctgagcaccaccccacgccctgccctcacccctcaccaccatctgtgcactgatgagtctccagtttagccaagggctttgttcctggcatggagaatttgttcctggctgctgtgtttccagggggtgctgggggaagggttccgtggagcgagacaaggtgtcctcgggagcagggttccaccgggaagcgtttgggagccctgtatcacacggggcaggcgggtttctcttccggggtctctgctcttatgcatcaggacgaccccgggacggctgtggggccccacactgcacccacagggctctatgcgacaggggcccaggaacagcctgaggccaccacccagcaagcccgccttatcacccattccagctcacccagaaccttcaccagcaaacctcctgctgaggtcctggcaggaggccaccgtcttgttaccgtttccttttcgtttgctgagggtcacagaccccaacagggaaatcagtatctgtcttcccagtggttgccctgctcgccgggcactccacggggtcccgcccttgtgtgagatgggccaggatccttcggcaaggggcgcctggggctggggctgattgtgggcggtggagcgccagacagaaaaggattccaatgagaacttcaggttaaagtcagatgccacctaccagggtctacagtcaaaatgttggctttttcttattttttaatgtatgggagaaaaatgtaaaattccagttcttttctaattgtgtttctgaaattaggagtcagctgccagcgtttttgtgtggctgcagtgtgcctgggcccagctcacgggcagtgggtggacctaactgcccaggcaggcgagagctacttccagagccttccagtgcatgggagggcagggctaggtgtagcggtgtctcctctttgaaattaagaactatctttcttgtagcaaagctgcacctgatgatgctgcctctcctctctgtgttgtctgggcccttgtttacaagcacgcgttacccttcctgaggggagccatgctctagcccctggagggcctgttgcaggggcagggcgggcccgtcgcctttggcagctcctggagagctgtggacatgcagtccccctcagttcgtgctgcaataaaggccatcttctcttaaaaaaaaaaaaaaaaaaaaaaaaaaaaaaaaaaaaaaa

SEQ ID NO: 20 - DNA, 1384 bp, Homo sapiens
gttgctcaggcctccctcaaactagccaatgagaagtgcacgggtcctggtcgcctaggaaaccgcgtgacaacaagatggcggcgctgcgggacggctagcggccctgcgtgggagttcctgacagctggattctagaagtagaactatgagctcacctttggcctcccttagcaagacccgaaaagtgcccctgccctcggagcctatgaatcctgggaggcgaggaatccgcatctatggagatgaagatgaggtggacatgttgagtgatgggtgtggctcagaagaaaagatctcagtcccttcctgctatggcggcataggtgcccctgtgagtcggcaaggggactcattggcgccccctgaggtggactttgacaggctgctggccagcctgcaggatcttagtgagctggtggtagagggtgacacccaagtgacaccagtgcccggcggggcacggctgcgtaccctcgagcccatcccgctgaagctctaccggaatggcatcatgatgttcgacgggcccttccagcccttctacgatccctccacacagcgctgcctccgagacatattggatggcttctttccctcagagctccagcgactgtaccccaatggggtcccctttaaggtgagtgacttgcgcaatcaggtctacctggaggatggactggaccccttcccaggcgagggccgtgtggtgggcaggcagctgatgcacaaggccttggacagggtggaggagcacccaggctccaggatgactgctgagaaatttctgaacaggctccccaagtttgtgatccggcaaggcgaggtgattgacatccggggccccatcagggacaccttgcagaactgctgcccattgcctgcccggatccaggagattgtggtggagacgcccaccttggccgctgagcgagagaggagccaggagtcacccaacacgccggcacccccgctctccatgctgcgcatcaagtctgagaatggggaacaggccttcctactgatgatgcagcctgacaacaccattggggacgtgcgagctctgctagcgcaggccagggtcatggatgcctctgcctttgagatcttcagcacattcccgcccaccctctaccaggacgatacactcacgctgcaggctgcaggccttgtgcccaaagcagcactgctgctgcgggcacgccgagccccgaagtccagcctgaaattcagtcctggtccctgtcccggtcccggtcccggccccagtcccggtcccggtcccggccccagtcccggtcccggtcccggccccagtccctgtcctggacccagtcccagcccccaataaagcacccgccccctcaaaaaaaaaaaaaaaaaa

SEQ ID NO: 21 - DNA, 1546 bp, Homo sapiens
gtggccacccgcaggtagtgatgtcgagcgtcgagctcccaaaaccgagctggtgaggggctgcaggtggcggcgcagtctcggtaggcggtatgagtttggctgggggccgggcaccccggaagaccgctgggaaccggctttctgggcttttggaggcagaggaggaagatgagttctaccagacgacttatgggggtttcacagaggaatccggagatgatgagtatcaaggggaccagtcagacacagaggacgaagtggactctgactttgacattgatgaaggggatgaaccatccagtgatggagaagcagaagagccaagaaggaagcgccgagtagtcaccaaggcctataaggaacctctcaagagcttaaggcctcgaaaggtcaacaccccggctggtagctctcagaaggcgcgagaagagaaggcactactgccattagaactacaagatgacggctctgacagtcggaagtctatgcgtcagtctacagctgagcatacacgacaaacgttccttcgggtacaggagaggcagggccagtcaagacggcgaaaggggccccactgtgagcggccactaacccaggaggaactgctccgggaggccaagatcacagaagagcttaatttacggtcactggagacatatgagcggctcgaggctgataaaaagaagcaggttcataagaagcggaagtgccccgggcccataatcacctatcattcagtgacagtgccacttgttggggagccaggccccaaggaagagaacgttgacatagaaggacttgatcctgctccctcggtgtctgcattgactcctcatgctgggactggacccgtcaacccccctgctcgctgctcacgtaccttcatcacttttagtgatgatgcaactttcgaggaatggttcccccaagggcggcccccaaaagtccctgttcgtgaggtctgtccagtgacccatcgtccagccctataccgggaccctgttacagacataccctatgccactgctcgagccttcaagatcattcgtgaggcttacaagaagtacattactgcccatggactgccgcccactgcctcagccctgggccccggcccgccacctcctgagcccctccctggctctgggccccgagccttgcgccagaaaattgtcattaaatgaagagatgtctagtcctcagaaacttctttcctgccctgattggggctcttgctgttccgtttcttctccctgcttctcccctttgtcatctctgatctttgcctaatctgtttctttttccttttcccctagttcttacaggtttcgttgtgttttttaatctaataaaatagaaagatcccttttgtctggtgtccagtctagggttgggagcaagaagtatttgaatacctgcatatatttgggtctttattcgatagcatttattatgagctgtcctttctaaattgtattcattcctccaactaaattataaacatctgaaaattgcacaccaaaacacaaaaaaaaaaaaaaaa

SEQ ID NO: 22 - DNA, 2173 bp, Homo sapiens
gtccgcgtttggccggccgtggggaaggaagaaaggagccaaggaggcgaggcatggatccgcagcctcctccacccgcccagggcagcccacctcaccgtggccgaggccggggccgtggccgaggccgtggtcggggccgtggccgtggcagggggggcgctggagcccctagggcgcccctgccctgccccacctgcggccgcctcttccgtttcccctactacctctcccggcaccggctgagccactcggggctccggccccacgcctgcccgctgtgccccaaggccttccgccggccggcccacctttcccgccacctgcgcggccacgggccccagcccccgctgcgctgcgccgcctgcccccgcaccttcccagaaccggcccagctcaggcgccacctggctcaggagcacgcgggcggcgaggtcgagctggccatcgagagggtggccaaggagacggccgaacccagctggggcccgcaggacgagggctcggagccgcccaccaccgctgcagcaggggccacggaggaggaggcggtcgcagcgtggcctgagacgtggcctgcgggggagccttccacgctggctgcgcccaccagcgccgcggagccccgggagtcggagtcggaggaggccgaggccggggcagcagagctgagggccgagctggcgctggcggccgggcggcaggaggagaaacaggtcctgctccaggcagactggacgctgctgtgtctgcgctgccgcgaagccttcgccaccaagggcgagctcaaggcgcacccgtgtctgcgccccgagggcgaacaggaaggggaaggggggcccccgccacgccccaagcgacaccagtgctccatctgcctcaaggccttcgccaggccctggtccctgtcgcgccaccggctggtccactccaccgaccgccctttcgtgtgcccagactgcggcctggccttccgcctcgcctcctacctccgccagcaccgccgcgtccacggccccctcagcctgctggccccgctgcccgcggcgggcaagaaggacgacaaggcctcgggtgcacggaactcagccaaggggccggaggggggcgagggggcggagtgcgggggtgcctcggaagggggagaagggcagaacggaggcgacgccgccccggctcggccccccgccggggagccccgcttctggtgcccagagtgcggcaaaggtttcaggcgccgggcgcacctgcggcagcacggggtgacccactcgggagcgcgccccttccagtgcgtgcgctgccagcgggagttcaagcgcctggccgacctggcgcgccacgcacaggtgcacgcggggggcccagccccgcacccgtgcccccgctgcccgcgccgcttctcgcgcgcctacagcctcctgcgccaccagcgctgccaccgcgcagagctggagagggccgccgcgctgcaggcactgcaggcccaggccccgacgtcgccgccaccgcccccgccgcccctgaaggccgagcaggaggaagaagggctcccgctgcccctcgcaaacattaaggaagagccgccctctccggggaccccaccccagtccccgccggctccccctgtcttcctcagcgcctcctgtttcgacagccaagaccactcagccttcgagatggaggaggaagaggtagacagcaaggctcacctgcgcgggctggggggcctggcctcctgaccttcgccgccctgccctccgccgctccgcctgagctccccggtttgcagaatggaggagggaagttgaaggagccacctcctctgtctacccacccgtccccttcacgcccttgacactaaggagtggggggccctggactgccccttcctcccccatcgcccgcccccagaacccctgatgctggttaggaaccgctcaccccaacatgtgtcttaaggcaggacgacttggaaaaaaaggcggcggacagttggccagagggatggagactggtggggacgcccccgcctccctgtcccccgtttcacacactggacaccatcacctctttggaactgccagaccctgggggtccccagtgagcaaaggtctgtccttgtccctttgtctgtctgtgaataaatgtgagttcgtgaaatccaaaaaaa

SEQ ID NO: 23 - DNA, 1467 bp, Homo sapiens
agaaaccacgcctgcccccttcagccttttcccccctccgccgcatttttccatctccccttgagtgagtggatgtcccgttgccttttctcagctttgcgcgacgtggtcccacaaccgttgcctttttaagagaggcccggcccatccagagggggtggggcagaggcggagtctgaggagctggggaaggaacaaagcgaggcctgcgggcggcggctgggctccggcggggccgcggggtgcggggcctgcgggcggcggcccgggcggagcgttggagggaaggaggtggcatcgccgtccgcgccggccccggccatgaacgggctgccctcggcagaggcgccgggcggggcgggctgcgctttggccgggctcccaccgctgccgcgcggcctcagcggcctccttaatgcgagcgggggctcgtggcgggagctggagcgcgtctacagccagcgcagccgcatccacgacgagctgagccgcgccgcccgcgccccggacgggccccgccacgccgccggcgccgccaacgcgggacccgcagccggcccgcgtcgtcctgtcaacctcgactcagcgctggccgcgctgcgcaaggagatggtggggctgcggcagttggacatgtccttgttgtgccagctgtggggcctgtacgagtcaatccaggactacaaacacctgtgccaagacctgagcttctgccaggacctgtcatcctccctccattcggacagctcctacccaccggatgcgggcctgtctgacgacgaggagcctcccgatgccagcctgcctcctgacccgccaccccttactgtgccccagacgcacaatgcccgtgaccagtggctgcaggatgccttccacatcagcctctgaagggctggggggcagggggcatgcacccatgcaaaaggctcagaaactccccctccggcaagccctcagacttcggagcctgcgccttcccccctaccgcctcacctcacaggagggccaggcatgtattcctcagaggcgaaactgccaaactctttctcctgtcttgggttggctggcactggggcgggcatctagggtacagcctctgctcatggcactgggcctccagttcttccacatgtgtgcacccccagcttggccaaccctcagccttgcggtggggcccgaagcatcttcccttccgcttggcgtctctgggattgggatgagtgcctggctcccatctcctcctcaccttttgttgctatcggcagctgctggctcaggggcatcccacctccgggctctgggttcctctgccctggaagggctccaggacccgtcccaataaccacccacggccaggagggccaaggccccgtgctggatatttaaatttaggggccggtctccagggcgcgtagataaataaatacactcagcgtcgttgtgctaaaaaaaaaaaaaaaaaaa

SEQ ID NO: 24 - DNA, 1071 bp, Homo sapiens
ttccgggcgtgcgcagccgcagagcgccgcagcctcgccagctcgccccggcactgcgcacttgccagccagtccgcccgtccggagcccggctcgctggggcagcatggcggggtcgccgctgctctgggggccgcgggccgggggcgtcggccttttggtgctgctgctgctcggcctgtttcggccgccccccgcgctctgcgcgcggccggtaaaggagccccgcggcctaagcgcagcgtctccgcccttggctgagactggcgctcctcgccgcttccggcggtcagtgccccgaggtgaggcggcgggggcggtgcaggagctggcgcgggcgctggcgcatctgctggaggccgaacgtcaggagcgggcgcgggccgaggcgcaggaggctgaggatcagcaggcgcgcgtcctggcgcagctgctgcgcgtctggggcgccccccgcaactctgatccggctctgggcctggacgacgaccccgacgcgcctgcagcgcagctcgctcgcgctctgctccgcgcccgccttgaccctgccgccctagcagcccagcttgtccccgcgcccgtccccgccgcggcgctccgaccccggcccccggtctacgacgacggccccgcgggcccggatgctgaggaggcaggcgacgagacacccgacgtggaccccgagctgttgaggtacttgctgggacggattcttgcgggaagcgcggactccgagggggtggcagccccgcgccgcctccgccgtgccgccgaccacgatgtgggctctgagctgccccctgagggcgtgctgggggcgctgctgcgtgtgaaacgcctagagaccccggcgccccaggtgcctgcacgccgcctcttgccaccctgagcactgcccggatcccgtgcaccctgggacccagaagtgcccccgccatcccgccaccaggactgctccccgccagcacgtccagagcaacttaccccggccagccagccctctcacccgaggatccctaccccctggccccacaataaacatgatctgaagcagctcaaaaaaaaaaaaaa

SEQ ID NO: 25 - DNA, 7048 bp, Homo sapiens
gcgggtggtgccggtggcggcggcgggggagcgcgggacaggaggcttcggggaagatggacccggcgccctcgctgggctgcagcctcaaggatgtgaagtggagctcggtggccgtgccgctcgacctcctggtcagcacttaccggctgccccagatcgcgcgcctggacaacggagagtgcgtagaagggctgcgggaaaatgactatctgctgattcattcctgccgccagtggaccaccatcactgcccacagcttggaggagggtcactatgtcattgggccaaagatagagattccggtacattatgcagggcaattcaagctgctggaacaagaccgagatataaaggagccagtgcaatatttcaacagtgtggaggaggtggctaaggcatttcctgaacgcgtgtacgtcatggaggatatcacattcaacgtgaaggttgcttcaggtgaatgcaatgaagacactgaagtttacaacatcaccctgtgtactggggatgaactcactctaatggggcaggcagaaatcctttatgcaaagacattcaaggaaaagtcacgactcaacacaatcttcaaaaagattgggaagctcaattccatcagcaagctgggaaaaggcaaaatgccgtgcctcatttgtatgaatcaccggaccaacgaaagcattagccttccattccagtgcaagggcagatttagcacccgaagtcccctggaacttcagatgcaagagggcgaacacaccatccgcaacattgtggagaaaaccaggcttcctgtgaatgtgactgtgccaagccctccaccgagaaacccatacgacctccacttcatccgtgaggggcaccgctataagtttgtgaacatccagaccaagacggtggtggtttgctgtgtgctgcggaacaacaagatcctccccatgcactttcctttgcacttgactgtccccaagttcagcctcccagaacacctggtgaagggagagagctggcccgaaaccctggtccatcactggctaggtatctgccaagaacagttcgacatcgatgagtattcacgggctgtccgtgatgtgaaaaccgactggaatgaagaatgcaagagccccaagaagggtcggtgctctggccacaaccacgtgcccaattcgctcagctacgcccgcgatgagctcacccagtccttccaccgactctcggtctgtgtgtatggcaacaatctccatggcaacagtgaggtgaaccttcatggttgcagggacctggggggagattgggctccctttcctcatgacatcctgccctatcaggactctggagatagtgggagcgactaccttttcccagaagctagtgaagaatcagcaggcatcccgggaaagtcagaacttccctacgaagagctgtggctggaggaaggcaagcccagccatcagcctctcactcgctctctgagcgagaagaacagatgtgatcagtttagaggttctgtccgatccaaatgtgcgacttctcctcttcccatccctgggactctgggagcagcagtgaagtcttcagatactgccctacctccacctccagtgcctcccaaatctgaagccgtcagagaagaatgccggctcctgaacgccccacctgttccaccccgaagcgcaaagcctttgtccaccagtccctccatccctcctcgcacagtcaagccagcgcggcaacagactcgctctcccagccccaccttgtcctactattcttcagggctacacaacatcgtcactaaaactgacacaaatccttctgaaagcactcctgtttcctgctatccatgtaaccgagtgaaaactgattctgtggacctgaaatccccgtttggaagtccttctgctgaagctgtgtcctctcggctctcatggcctaaccattattcaggagcatcagaaagccagaccaggagtgacttcctgctggatccaagcaggagttatagttaccctagacaaaagacgccaggcacaccaaagagaaactgcccagcaccttttgattttgatggctgtgagctcctggccagccccactagcccagtcactgcagaattcagtagcagcgtctctggttgtcccaagtcagccagctactctctggagagcacagatgtgaaatctcttgcagctggtgtgacaaagcagagtacgtcatgccctgccttaccccccagggctccaaaactagtggaagagaaggtcgcctccgaaacatctcctttgcctctgaaaattgatggtgctgaggaagaccccaagtctgggtcaccagatctctcggaggaccagtattttgttaaaaagggcatgcaggacatcttctctgcctcctaccctttctcatctccgctccatctccagctggcccccagatcctgtggcgacggttccccatggcagccacctgctgacctatcaggactctctatagaggaagtgtccaagtcactacggttcattggtttgtccgaagatgtcatatcattctttgttactgaaaagattgatgggaacctgcttgttcagctaacggaagaaatcctctcagaggatttcaaattgagcaaattgcaggtgaagaagataatgcaattcattaatggctggaggcccaaaatatagccaaataacccccggccagcatggaacaaaactgatcaatgcgtgtgctagaaggggtgggctgggacacaatttcatgtttttgcactaaaaaccttctctgtaaatagggataagagaaactcttactatgcagattacgtttttgaatggtgaacaggctattttgtacatcaataaaaatgctgtacagaacacttggaggtgtgccttgtacgtcactcaacaaacactcagcagctgctaaaagaaaaaaaggcatgtgcagagaaatcattcttacccaagtaggtttatgtgagaaggtatgatatttattacaaaatagccaaagctggaagacataaaaatctttaaaaaaaaaaaaaaaacacttttgaacaagtcccttctttcaggagggttgactttagacaattaactgtgttctgtgctctgtcattcagattgcttcttgctaattgttttactcttgtgcctgaaaatgttagtgatacgaattgacactttaatgttgtatgcttggtggggatctttttatcacaaggcattttccaagagtcatatgttgataaagggatatatgttgtccttagaaatcacacaaatcatgaccacaataatttatctgtaactgctgctaattttattgagcagagaaaaaagaatatacatatataaacatgtataggtgcatacacaatacacccggatatgttttacacataattttgattctgatattttagataacatctgttcacttttaaacaatctgttgaggttttgggactgttatctacattgattctcttaggaatagtggacagaatgactccaaagattctcagaaccctgtctcttgaagctcaatcttatttgggttcatcactgaaaacttagaacaaatcagtaaagaatcctgtattgaagaattaagtttgagtttaagcccactcaccgcagggctggtttttgcatgtaatactcccatgatgtctggggaaatgacagtttctgttgaattataattctccggtttaagggtctccttcccctggtgtctgatggtgagaggtctgaagagcatttgtcagagtacattaggcattctcaacctacttcatgctttacgagagctgagaaatcagacgcaccggcctttattattatatatgctacatctgttgagtatttttaaaataccaataagaggacttgtttatttcataaaccacttcttccctctctttcaaagaaaatacattattaccatacttttacattagtctgagaatttttgctaaatatgattaagtattccaaaatataatggcgtcattattcttgacttttttagagaatatacatcttaagactgtattagttctcagagcaaggcatcatctactcccctgcacctgagagtctggccccagattccagatgtgcggacagcccatgaccgaggtgcacacagtgccctcttgaataggaaggtcagccagtgaggcggcagcataacttgcaggatggacttatatcttaccatctcttcctgctaccaaaataaaaaaataaattgaaagacaagacccaccagtctagttttgtagacctgtgaaatgtgtctttatttcttggcattagaagaaagatatttttaatccatatcgtggttttagagttgaagtgaattgatacccaattttccatcttagatctcctttatcaaaaaaaaaagcattttttttctcctaacgtgtctcccaaaatgtaaatactataggcaaaaagagtaccctgtaaaattctcacactggagcacctcttcaaaagtcacagataactcaatgaggaagtgctggtactgcactcacaggacatgagacctatgaagctttcgtgttttgaaagcatccttctgtgtgagggggactgcctcccttagtaaagtaaacctctcagaacttctttttaaaataaaaacagacaagatgcagttactaagctgcaagttttcattggcaaacctagctgaatccgttttaaaatacttagcactcggacacaattctcaaactcaggaagaaggaacagggttggtttgggtttactataaaggttgcctcacataaacaactgactccttttagcgttttttttctttttgtaaaaactttacacaaaatagggttttaaattctttttgcttgttttggacttggtgtatttttgtcaagtttatattgattggcaacgcagagactccttgagggcagggactgtggcctttgattcacttatgctacagtctagtatcactacagtgctgagtaaaagacacagcccctgccctcttggagatcatattgtttatatttgaaatctcagttgctaagagtatgtatgtgtgagtaagaaagacgtgaagtcctatgggcagctgggtatatggagaattacgtgtgtcctgtctttaaaacgtcagcctctattaaggggtacagaacaccccaagatcactaaaacttggaatgtgttggaggcagaaagtatctctctcattgcctagtgttgttgtttttttgttttttgttttttgttttttttactgacctggaattcttttaattgtaataaatatcttctgtcacaaataaatgccacaaataaatgaaattgccattcctaagctgagcacctgtctgtgaaggaccttggtgtcctgactggacagagcattcatagctccaagagaatcatgacaagatatgcaaagcagggataataaggagaaagcccttccctttcgagaagcccttccctttcacagcccttccctgcgattctgcagtgaaaagtgatgcccagagatccacacacagaacccttctaaccagccaggtcaagacttatcatcttatctcctctggcaggtcccctgtaatcaaaagagaggaagtgtctatctaaacaagacccttttgggtccttagattcatggcaaaaatcatcatggcccccatcagaaaagaaaatcagcaataaaccaagccaagcaactaaaatgtataatgtggacctgactcatgttgggaggcagaattcagacactcacagatcaatcttgcaagttttctcttctttaagttgagctgctcaactttatgaactgtgaaatttacttacattctttcaacccacatatatcattgcagtttatgaagttgcagtgaactgcccattcagctaaattgcagtgtttattcttgtctcatgtcgaaatacaacaatcttatgggaaatattatgacagtccgttccaactgttctcagacacatgcataaacagtctctgctcacattccacagccacctgcatgttatccatacagctccctgagaagtccagggatgggaggtggggtgtggaaggatggagggtccttcattttctaaacactttgtataagtcactactcatcgtgcctagcaagtataagattaacattttgaataacaaactggaaaacaaataatccttcaaagaacctagcgaactgttcaaaggaaattttaatttcagtctaccagaaaagttaaatctgttgttggacgtagggggctttcagaaacatgcctcttatatcaatttccactatctttcaagttacctaaaggcaccaggctgcttgagcaagaagaataaaaggcctagagtgcaaattatgtgaagtagagtttttagattgtgggattgtaataatacgggattctcatggttacatcatgttaaatcacactgttcagtctttaaaacttggtgttttaaaatttgtctcattgtgatagccagaaacaaggaataaacgtgatttcagtttaaactatatacaaatatcttctgtaattttgctgctctaatttttaggctataaattttgtaatagagcttatcagatcgcaaatttcctttgtttacaatctcatgtagtagggctcagataatttcttagctataaaccttttctcccactctcatattgtttcatttaaaatatttaagctaagcctaaaaattgaaatcagttaagaatttggagagtttatcttaaatggaaatggtgtattcttttcaaagaattttgtaaccatctttacagtttctttgcttggaaaacttgggttgttaactaccagttaacaatggcattactttccaaaacgttatctaatgggcccaatgtgtacctcaagataaacacagtatgttatgtctaaaaatttccttgtctgttgatttaaatggttctgaaatgtctgtaataaagaaattttcaaagttgcaaaaaaaaaaaaaa

SEQ ID NO: 26 - DNA, 1840 bp, Homo sapiens
gggttcccaggccgactctccttgtggttggctgaggctggaggtggacgggacttttggagggtcgctcgcgtctgttcgcagagctgtgggcggagttgaggccttggaggctgagatgtggttctgcgcgtgtgcggacggctgtctgttaactccgcggtcagttcccggactggtggctggtctgcagggttgacctgcgcaatgcagaggctgcaggtagtgctgggccacctgaggggtccggccgattccggctggatgccgcaggccgcgccttgcctgagcggtgccccgcaggcctcggccgcggacgtggtggtggtgcacgggcggcgcacggccatctgccgggcgggccgcggcggcttcaaggacaccacccccgacgagcttctctcggcagtcatgaccgcggttctcaaggacgtgaatctgaggccggaacagctgggggacatctgtgtcggaaatgtgctgcagcctggggccggggcaatcatggcccgaatcgcccagtttctgagtgacatcccggagactgtgcctttgtccactgtcaatagacagtgttcgtcggggctacaggcagtggccagcatagcaggtggcatcagaaatgggtcttatgacattggcatggcctgtggggtggagtccatgtccctggctgacagagggaaccctggaaatattacttcgcgcttgatggagaaggagaaggccagagattgcctgattcctatggggataacctctgagaatgtggctgagcggtttggcatttcacgggagaagcaggatacctttgccctggcttcccagcagaaggcagcaagagcccagagcaagggctgtttccaagctgagattgtgcctgtgaccaccacggtccatgatgacaagggcaccaagaggagcatcactgtgacccaggatgagggtatccgccccagcaccaccatggagggcctggccaaactgaagcctgccttcaagaaagatggttctaccacagctggaaactctagccaggtgagtgatggggcagctgccatcctgctggcccggaggtccaaggcagaagagttgggccttcccatccttggggtcctgaggtcttatgcagtggttggggtcccacctgacatcatgggcattggacctgcctatgccatcccagtagctttgcaaaaagcagggctgacagtgagtgacgtggacatcttcgagatcaatgaggcctttgcaagccaggctgcctactgtgtggagaagctacgactcccccctgagaaggtgaaccccctggggggtgcagtggccttagggcacccactgggctgcactggggcacgacaggtcatcacgctgctcaatgagctgaagcgccgtgggaagagggcatacggagtggtgtccatgtgcatcgggactggaatgggagccgctgccgtctttgaataccctgggaactgagtgaggtcccaggctggaggcgctacgcagacagtcctgctgctctagcagcaaggcagtaacaccacaaaagcaaaaccacatgggaaaactcagcactggtggtggtggcagtggacagatcaaggcacttcaactcatttggaaaatgtgaacactgatgacatggtataggagtgggtggggtgttgagccacccatcagaccctctttagctgtgcaagataaaagcagcctgggtcacccaggccacaaggccatggttaattcttaaggcaaggcaaatccatggatgagaagtgcaatgggcatagtaaaagtgcatgaatttatcttaaaaaaaaaaaaaaaaaaaaaa

SEQ ID NO: 27 - DNA, 4966 bp, Homo sapiens
aaccacgatgtctttggcacagcctctcatctgtcagatgggagcggggaccccggagagggagtcagccgaggtcctggcattccttgtgaacccccgtctgtgggtttctggtccagtgtcccttctccagattagatggcttaggcctcctctaagggggtgggcgtgcacatccggagagctgtctggtgtgcaggactgggctgcaggttaccctgaactgcaaccatcttagagcaaggcccagcttgcagcaggaggagctgcaggccgcccaccctagccacggcccctgccctggcaggaagcttccaagagtaaacactgcctaatcgtcccgcccagtagtgagcaggcctgtcccattccatactgaccagattcccagtcaccaaggccccctctcactccgctccactcctcgggctggctctcctgaggatgcaccagcgtcacccccgggcaagatgccctcccctctgtgtggccggaatccttgcctgtggctttctcctgggctgctggggaccctcccatttccagcagagttgtcttcaggctttggagccacaggccgtgtcttcttacttgagccctggtgctcccttaaaaggccgccctccttcccctggcttccagaggcagaggcagaggcagaggcgggctgcaggcggcatcctacacctggagctgctggtggccgtgggccccgatgtcttccaggctcaccaggaggacacagagcgctatgtgctcaccaacctcaacatcggggcagaactgcttcgggacccgtccctgggggctcagtttcgggtgcacctggtgaagatggtcattctgacagagcctgagggtgctccaaatatcacagccaacctcacctcgtccctgctgagcgtctgtgggtggagccagaccatcaaccctgaggacgacacggatcctggccatgctgacctggtcctctatatcactaggtttgacctggagttgcctgatggtaaccggcaggtgcggggcgtcacccagctgggcggtgcctgctccccaacctggagctgcctcattaccgaggacactggcttcgacctgggagtcaccattgcccatgagattgggcacagcttcggcctggagcacgacggcgcgcccggcagcggctgcggccccagcggacacgtgatggcttcggacggcgccgcgccccgcgccggcctcgcctggtccccctgcagccgccggcagctgctgagcctgctcagcgcaggacgggcgcgctgcgtgtgggacccgccgcggcctcaacccgggtccgcggggcacccgccggatgcgcagcctggcctctactacagcgccaacgagcagtgccgcgtggccttcggccccaaggctgtcgcctgcaccttcgccagggagcacctggatatgtgccaggccctctcctgccacacagacccgctggaccaaagcagctgcagccgcctcctcgttcctctcctggatgggacagaatgtggcgtggagaagtggtgctccaagggtcgctgccgctccctggtggagctgacccccatagcagcagtgcatgggcgctggtctagctggggtccccgaagtccttgctcccgctcctgcggaggaggtgtggtcaccaggaggcggcagtgcaacaaccccagacctgcctttggggggcgtgcatgtgttggtgctgacctccaggccgagatgtgcaacactcaggcctgcgagaagacccagctggagttcatgtcgcaacagtgcgccaggaccgacggccagccgctgcgctcctcccctggcggcgcctccttctaccactggggtgctgctgtaccacacagccaaggggatgctctgtgcagacacatgtgccgggccattggcgagagcttcatcatgaagcgtggagacagcttcctcgatgggacccggtgtatgccaagtggcccccgggaggacgggaccctgagcctgtgtgtgtcgggcagctgcaggacatttggctgtgatggtaggatggactcccagcaggtatgggacaggtgccaggtgtgtggtggggacaacagcacgtgcagcccacggaagggctctttcacagctggcagagcgagagaatatgtcacgtttctgacagttacccccaacctgaccagtgtctacattgccaaccacaggcctctcttcacacacttggcggtgaggatcggagggcgctatgtcgtggctgggaagatgagcatctcccctaacaccacctacccctccctcctggaggatggtcgtgtcgagtacagagtggccctcaccgaggaccggctgccccgcctggaggagatccgcatctggggacccctccaggaagatgctgacatccaggtttacaggcggtatggcgaggagtatggcaacctcacccgcccagacatcaccttcacctacttccagcctaagccacggcaggcctgggtgtgggccgctgtgcgtgggccctgctcggtgagctgtggggcagggctgcgctgggtaaactacagctgcctggaccaggccaggaaggagttggtggagactgtccagtgccaagggagccagcagccaccagcgtggccagaggcctgcgtgctcgaaccctgccctccctactgggcggtgggagacttcggcccatgcagcgcctcctgtgggggtggcctgcgggagcggccagtgcgctgcgtggaggcccagggcagcctcctgaagacattgcccccagcccggtgcagagcaggggcccagcagccagctgtggcgctggaaacctgcaacccccagccctgccctgccaggtgggaggtgtcagagcccagctcatgcacatcagctggtggagcaggcctggccttggagaacgagacctgtgtgccaggggcagatggcctggaggctccagtgactgaggggcctggctccgtagatgagaagctgcctgcccctgagccctgtgtcgggatgtcatgtcctccaggctggggccatctggatgccacctctgcaggggagaaggctccctccccatggggcagcatcaggacgggggctcaagctgcacacgtgtggacccctgcggcagggtcgtgctccgtctcctgcgggcgaggtctgatggagctgcgtttcctgtgcatggactctgccctcagggtgcctgtccaggaagagctgtgtggcctggcaagcaagcctgggagccggcgggaggtctgccaggctgtcccgtgccctgctcggtggcagtacaagctggcggcctgcagcgtgagctgtgggagaggggtcgtgcggaggatcctgtattgtgcccgggcccatggggaggacgatggtgaggagatcctgttggacacccagtgccaggggctgcctcgcccggaaccccaggaggcctgcagcctggagccctgcccacctaggtggaaagtcatgtcccttggcccatgttcggccagctgtggccttggcactgctagacgctcggtggcctgtgtgcagctcgaccaaggccaggacgtggaggtggacgaggcggcctgtgcggcgctggtgcggcccgaggccagtgtcccctgtctcattgccgactgcacctaccgctggcatgttggcacctggatggagtgctctgtttcctgtggggatggcatccagcgccggcgtgacacctgcctcggaccccaggcccaggcgcctgtgccagctgatttctgccagcacttgcccaagccggtgactgtgcgtggctgctgggctgggccctgtgtgggacagggtacgcccagcctggtgccccacgaagaagccgctgctccaggacggaccacagccacccctgctggtgcctccctggagtggtcccaggcccggggcctgctcttctccccggctccccagcctcggcggctcctgcccgggccccaggaaaactcagtgcagtccagtgcctgtggcaggcagcaccttgagccaacaggaaccattgacatgcgaggcccagggcaggcagactgtgcagtggccattgggcggcccctcggggaggtggtgaccctccgcgtccttgagagttctctcaactgcagtgcgggggacatgttgctgctttggggccggctcacctggaggaagatgtgcaggaagctgttggacatgactttcagctccaagaccaacacgctggtggtgaggcagcgctgcgggcggccaggaggtggggtgctgctgcggtatgggagccagcttgctcctgaaaccttctacagagaatgtgacatgcagctctttgggccctggggtgaaatcgtgagcccctcgctgagtccagccacgagtaatgcagggggctgccggctcttcattaatgtggctccgcacgcacggattgccatccatgccctggccaccaacatgggcgctgggaccgagggagccaatgccagctacatcttgatccgggacacccacagcttgaggaccacagcgttccatgggcagcaggtgctctactgggagtcagagagcagccaggctgagatggagttcagcgagggcttcctgaaggctcaggccagcctgcggggccagtactggaccctccaatcatgggtaccggagatgcaggaccctcagtcctggaagggaaaggaaggaacctgagggtcattgaacatttgttccgtgtctggccagccctggagggttgacccctggtctcagtgctttccaattcgaactttttccaatcttaggtatctactttagagtcttctccaatgtccaaaaggctagggggttggaggtggggactctggaaaagcagcccccatttcctcgggtaccaataaataaaacatgcaggctgaccggcgtttttttcttaaaaaaaaaaaaaaaa

SEQ ID NO: 28 - DNA, 3671 bp, Homo sapiens
gtgcgtggcgtgcgtgcgttgacctgggaagcactggacctgtgaggcgtgcgaactggtggcagtgagagacttcggcggacatggctcccagcgtgccagcggcagaacccgagtatcctaaaggcatccgggccgtgctgctggggcctcccggggccggtaaagggacccaggcacccagattggctgaaaacttctgtgtctgccatttagctactggggacatgctgagggccatggtggcttctggctcagagctaggaaaaaagctgaaggcaactatggatgctgggaaactggtgagtgatgaaatggtagtggagctcattgagaagaatttggagacccccttgtgcaaaaatggttttcttctggatggcttccctcggactgtgaggcaggcagaaatgctcgatgacctcatggagaagaggaaagagaagcttgattctgtgattgaattcagcatcccagactctctgctgatccgaagaatcacaggaaggctgattcaccccaagagtggccgttcctaccacgaggagttcaaccctccaaaagagcccatgaaagatgacatcaccggggaacccttgatccgtcgatcagatgataatgaaaaggccttgaaaatccgcctgcaagcctaccacactcaaaccaccccactcatagagtactacaggaaacgggggatccactccgccatcgatgcatcccagacccccgatgtcgtgttcgcaagcatcctagcagccttctccaaagccacatcctagtatcagaaggccaggcgagactgcaacactgctcatcaccccgcggcgtgatccctgctcttaggtgctgggcagaggggaagggtggtcagggtgaggatggtgagggagggctggtgaggggctcagaggaatacttggaacaacagcagtgttattgtagtgtggcagtttcttttatacataggtgagagtttttaaagtgtaagggaaaaattaattttttaaaaaacaccatgcttggagggtgggggtagaaatagacacaatattatttctaaggaatcgggttttcatttactctggactggtgaaaatattttttaaagccagtgctctaagacctcagcttttatctcagaaccccatgggttccagaccaagagtacaggaaatcaaattgttgtcctgtctgtctatagcttggaacagggagctttgattactgactccggttccacacactgtaagatcaaaaaaccatctccacatttgaaagagatgtaaggtgtattcatagggatggtggctcaacaaatcaagcaaactggaatcaaggggagggggaagggaatgaaatggaaagggaggctgattcccttcccctgacttaccactaatttactaggctacctactttcatgagtaacctctcacagctacccagcacatgccacaatcctatgctcttgccttcttttatctgcactgtgtgaagggactcttttaaataaatgagcaagtgtcctaagctatgtcatccaaagattgtcctttccattctcaaatcctgtgactgggatcactcaacagcactgtgatgtattattttcaatgaggtgcctttcttaactgaccaaatgctgccttgtttggcccctaaatcaataaaatatgttaaaatttgtatcccctgttgtggcattttttttagataatctaagctagaaaaatgacattgaattctggacctggctggaaggaaaagaagccctttcttgtcgctggcagctgtgtggtagggaggtccaagtatgtgcatatgagataagcctgcaacctcttgaccttcagctcctatgcaggcttctcttgagcccagagacaaggcagcttggtctagtggagatagcactgtgcttggagttcaggggacctaggacaaatcccagccagttagttattcactgtgctcctgtttcctcagctgaaaaaggaagttggttatgccaccttcttggccttaatggcattaaatgaaatttataggaagaaggtttttgctcagtacctggcatgcaacagacattggataaatgttagttggatccagatatacacagaaagatatctgcttcctgccaggctggataactgttgaatggacacttgtccatagtctagaaagccagtgcttctaatccttaagccagatctttgactaccttttcagttgcttctttaacactctttgttgcttctctgtgtgtcctagtttaaattcatttcctctccagcaaaagtgagcttaaataatttctccaaactaaagctctcatgtttttggaagggctgcctttgcaagtgaggtttctgagaaatgactgttgttcccaaaacaagagggagctgggctggaagcaccactattcttctttaggcatcttgttacagagagaggcagggtcttcactgacatattaaatcctgttccctgaaccagcccctccctcttctgctccacttcctcacctgtgcagagtcattttcaggtgttagccttactgatttgcactgatctgtttgttccctgagctttttaaataccctgtgaaaattttctttcctcccttggtcatcatgcatctaattgtggggaaatgtttgtcaaaccaacctgcaaagcagcatggtgtagttgagaagaataaacagagaagactgggtgagctattgtttgtttgcttctttgggcctgggtttcctcatctaatctgcaaaccaagaatgcagactagtcctaccactcccggaagactgacgttgtgccaggtattatgcaaaggcttcatgtaaccctcgacttcacgtaaccctcacacagcaccctgtggagtcagaactgtccttcacttttataggtgaggaaaccagactcagagaggtgaagtggcattcctgaggtcatgcataagaggcagtcaggactgaaacacagtctctaacacttatccgtccccttgatcttgttgctgaagtgatttaattacttgcgtagctctgcacacaggaagggctgctctgaataagagctcttttccatggacactcagcgctgccggaactgattttgaagaagtcactgccggctctgagggcctagggtatgtgtcttaggatctcctgtgtgcacaaagtgtcactgacagaacacagcaggatggagagcagcctcctcagaagcctcacaagtctttcctcagatgaagacagagcaacgagtcagaagacagatttcaacagcgacttcaccatgcgaccttggacaagttatctcacctcatcagtagaataggaatgatccctacccctcaaaggtgctgatgacactagtgaccaagatactcatgtgggttggactgcccaggacacagcagatgcttagtaaacacagatggaattcagagggaaaatgtaggcattgaagaaagttgtcttactgaccatccggaaccaggctaaggatcccctagaaatcatagacctctgaaattatatgcagaattctttatgtgttttcataattaataatagtctaacatattaaattcttagctgtgtgagaggttctgcatgcattatctcatttattctcctcgataaccctgt

SEQ ID NO: 29 - DNA, 2458 bp, Homo sapiens
cagaagaaggcagcgcccaaggcgcatgcgcagcggtcactcccgctgtatattaaggcgccggcgatcgcggcctgaggctgctcccggacaagggcaacgagcgtttcgtttggacttctcgacttgagtgcccgcctccttcgccgccgcctctgcagtcctcagcgcagttatgcccagttcttcccgctgtggggacacgaccacggaggaatccttgcttcagggactcgggaccctgctggaccccttcctcgggtttaggggatgtggggaccaggagaaagtcaggatccctaagagtcttccctgcctggatggatgagtggcttcttctccacctagattctttccacaggagccagcatacttcctgaacatggagagtgttgttcgccgctgcccattcttatcccgagtcccccaggcctttctgcagaaagcaggcaaatctctgttgttctatgcccaaaactgccccaagatgatggaagttggggccaagccagcccctcgggcattgtccactgcagcagtacactaccaacagatcaaagaaacccctccggccagtgagaaagacaaaactgctaaggccaaggtccaacagactcctgatggatcccagcagagtccagatggcacacagcttccgtctggacaccccttgcctgccacaagccagggcactgcaagcaaatgccctttcctggcagcacagatgaatcagagaggcagcagtgtcttctgcaaagccagtcttgagcttcaggaggatgtgcaggaaatgaatgccgtgaggaaagaggttgctgaaacctcagcaggccccagtgtggttagtgtgaaaaccgatggaggggatcccagtggactgctgaagaacttccaggacatcatgcaaaagcaaagaccagaaagagtgtctcatcttcttcaagataacttgccaaaatctgtttccacttttcagtatgatcgtttctttgagaaaaaaattgatgagaaaaagaatgaccacacctatcgagtttttaaaactgtgaaccggcgagcacacatcttccccatggcagatgactattcagactccctcatcaccaaaaagcaagtgtcagtctggtgcagtaatgactacctaggaatgagtcgccacccacgggtgtgtggggcagttatggacactttgaaacaacatggtgctggggcaggtggtactagaaatatttctggaactagtaaattccatgtggacttagagcgggagctggcagacctccatgggaaagatgccgcactcttgttttcctcgtgctttgtggccaatgactcaaccctcttcaccctggctaagatgatgccaggctgtgagatttactctgattctgggaaccatgcctccatgatccaagggattcgaaacagccgagtgccaaagtacatcttccgccacaatgatgtcagccacctcagagaactgctgcaaagatctgacccctcagtccccaagattgtggcatttgaaactgtccattcaatggatggggcggtgtgcccactggaagagctgtgtgatgtggcccatgagtttggagcaatcaccttcgtggatgaggtccacgcagtggggctttatggggctcgaggcggagggattggggatcgggatggagtcatgccaaaaatggacatcatttctggaacacttggcaaagcctttggttgtgttggagggtacatcgccagcacgagttctctgattgacaccgtacggtcctatgctgctggcttcatcttcaccacctctctgccacccatgctgctggctggagccctggagtctgtgcggatcctgaagagcgctgagggacgggtgcttcgccgccagcaccagcgcaacgtcaaactcatgagacagatgctaatggatgccggcctccctgttgtccactgccccagccacatcatccctgtgcgggttgcagatgctgctaaaaacacagaagtctgtgatgaactaatgagcagacataacatctacgtgcaagcaatcaattaccctacggtgccccggggagaagagctcctacggattgcccccacccctcaccacacaccccagatgatgaactacttccttgagaatctgctagtcacatggaagcaagtggggctggaactgaagcctcattcctcagctgagtgcaacttctgcaggaggccactgcattttgaagtgatgagtgaaagagagaagtcctatttctcaggcttgagcaagttggtatctgctcaggcctgagcatgacctcaattatttcacttaaccccaggccattatcatatccagatggtcttcagagttgtctttatatgtgaattaagttatattaaattttaatctatagtaaaaacatagtcctggaaataaattcttgcttaaatggtgaaaaaa

SEQ ID NO: 30 - DNA, 1920 bp, Homo sapiens
actaggggactccgcccctcccgatttcctccgggctacaggcgacagagctgagccaagcgtttactgggcagctgttacggtaagtgaggaggggctggggtgcccagcgttttggatctcccactctggcccggccccggaataccacatagaggccttgggacctgattcatcccgtccagacagccctagagacctgagcgactgaggcctgggatctggacgccggaatttcctgcgtggttctggacgccctgccctggggtaaggggccatgcggggctctggtctcagattccaaatgaaaatgtttgagagcgctgactctacagccacaagatctggccaggatctctgggctgaaatttgttcctgtctgccaaatcctgaacaagaagatggtgccaacaatgcattctcagactcctttgtggattcttgccctgaaggtgaaggccagagggaggtggctgactttgctgtccagccagctgtaaagccttgggctcccttgcaggattcagaagtgtatttagcatctctagagaagaagctaagaagaatcaaaggtttaaatcaggaagtgacttccaaggacatgcttcgaactctggcccaagccaagaaggaatgctgggatcggttcctccaggagaagttagcttcagagttctttgtggatggacttgattctgatgagagcaccttggaacatttcaagaggtggctccagccagataaagtagccgtcagcacagaggaggtccagtatctgattcctccagagtcacaggttgagaagccagtggccgaggacgagccagcagccggggacaagccagcagcagcagaacagtaaattacacacacacacacacacacacacacacacacacacacacacacacacacacacacacacacgccgagcagctgtctcgggtccagagcgagcagcgtggagctcagtgacagcagcagggagaaatccactgaaggaaaaaacccaaatttccactccacaaagaaaacagctgcaagcccccagggacttacctggggctggcatgtgtgactgtctcggatgaagtgactgacccagtgcacactggatcaaaatgctgctttcctctgtgtctcacagcttggctgagctctgtctctgcaggttagaagtctgctaaagatcaaatgtgaaagtacttggagaaactgaggcctcttatgtgtaatgtgtaagttaagtgagccatatattttcttgcctcttccggacattcatgcttgtgtcccaagcattcccttggtgaattgtcacgtgagtggggccagtaagagtgaagtctgctccttgaatccaagccccatctggggcttctctaacaaatctgtagtaagtatacggactccagggagagaggctgggcttctttctctcatttgttccttgtggaacaaatgggcaaaagaagtgtgaaaatgtgggtgtttatgtctgtgtatatgtattttttacttcatgcatggcttctcctccaacttcctcctgcacttaaaaagggccaggttccaaattagacttgtaaatatggtgttagtgtttgacactactcctggatagttccaaacatcttccttgtggcaggtttcctggctgagcccgagcttccctccctgtttattgtgttcatgatcagtatgtgtttccatataaaacttttctcaacggaatagcagtgtctgtggtgctgttgactcgattgctcctggaaggatgttcccaggcagcaggaggtaaagacaaatgcatgcaaaggcatgggagctggccactttgccagcctcctgttattagcatgtgccctcagacagtccagactttggtgttctgaggccttagctccatgggccttcttc

SEQ ID NO: 31 - DNA, 1664 bp, Homo sapiens
actgcgcatgcgtcaggcatggagagcggaagcggaaggttgaatgcgtcgggtgggcacctcagcaaccagtagccatgcgcggcttggaggagtcggggcctcggcctacagcgaccccgtgcggctgcgttaagccggctctggagacagggaatcttttaactgagccagtcggctacttggaatcttgtttctcggccaagaatggtactccaagacagccatccatttgtagctattctcgagcctgtttgaggattagaaagaggatctttaataatcctgaacattccttgatgggcctagaacagttttctcatgtttggattttgtttgtttttcacaaaaatggtcatttgagctgtaaggcaaaagtgcagcctcctaggctgaatggtgcaaagactggagttttttccacaaggagccctcatcgtcccaatgcaataggactgaccctggccaagctggaaaaggtagaaggtggagctatatacctttctggaattgacatgatacatggcacacccgtactagacatcaagccctacatagctgagtatgactcaccgcaaaatgtgatggagcctttagcagactttaatttacagaataaccaacatacaccaaacactgtgtcccagtctgacagcaagactgacagctgtgaccagcgacagctctcagggtgtgatgagccacaaccccaccatagcactaagaggaaacctaaatgtcctgaagacagaacttcagaagaaaactacctgacacacagtgacacagccagaattcagcaagcatttcctatgcacagggagatagcagtggattttggtttggaatcaagacgtgatcagagttccagcgtggcagaagaacaaattggcccatattgcccagagaagagcttttcagagaaaggtacagacaagaagctagaaagagtggaaggagcagcagtcttgcaaggaagcagggcagagacacagcccatggcccctcactgccctgctggaagggctgatggagctccccgcagcgtggttcctgcctgggtgacagaggctcctgtggccactttagaagtgcggtttactcctcatgccgagatggaccttgggcagctcagttcacaagatgttggtcaggcgtcatttaaatattttcagtcagcagaggaagcaaagcgtgccattgaggctgtgctgtcagcggatcctcggtctgtgtaccgccggaagctttgccaggaccgccttttctactttactgtagacatagcgcatgtcacttgctggtttggtgatggctttgcagaggtgctgaggatcaagccggcttctgagcctgttcatatgactggccctgtggggtccttggtgtctctagggtcttaaggagcctccctcatgtctttaaggtagcatcattgatctttggatgtggcttttggattttctgaacaagctaatgttgtgtcgagaagcaacactttgtgatctcatggctttgattgatttgggctgttcaaaatgtttatttgaaaaacgtatacattaataaacttaacaaagagatataaaatacagagaaatcaccaaatgctttttgatctgttgatattaaagaatcaaaaggtgaaaaaaaaaaaaaaaaaa

SEQ ID NO: 32 - DNA, 6559 bp, Homo sapiens
ccggccggtgtttcaggccctttaagaggcgacgctggagccggagccattttccccccttcggccgcggcgaggaggagccggagcgggagtgacaccgagccggacccagcgcgacctgcggcggctccgggtgactcgggccagtgtagaggtcctcaggccgccggcaggagcagctgggccaattccctggccgggagcggaaggggatggcgtcgggcctgggctccccgtccccctgctcggcgggcagtgaggaggaggatatggatgcacttttgaacaacagcctgcccccaccccacccagaaaatgaagaggacccagaagaggatttgtcagaaacagagactccaaagctcaagaagaagaaaaagcctaagaaacctcgggaccctaaaatccctaagagcaagcgccaaaaaaaggagcgtatgctcttatgccggcagctgggggacagctctggggaggggccagagtttgtggaggaggaggaagaggtggctctgcgctcagacagtgagggcagcgactatactcctggcaagaagaagaagaagaagcttggacctaagaaagagaagaagagcaaatccaagcggaaggaggaggaggaggaggaggatgatgatgatgattcaaaggagcctaaatcatctgctcagctcctggaagactggggcatggaagacattgaccacgtgttctcagaggaggattatcgaaccctcaccaactacaaggccttcagccagtttgtcagacccctcattgctgccaaaaatcccaagattgctgtctccaagatgatgatggttttgggtgcaaaatggcgggagttcagtaccaataaccccttcaaaggcagttctggggcatcagtggcagctgcggcagcagcagcggtagctgtggtggagagcatggtgacagccactgaggttgcaccaccacctccccctgtggaggtgcctatccgcaaggccaagaccaaggagggcaaaggtcccaatgctcggaggaagcccaagggcagccctcgtgtacctgatgccaagaagcctaaacccaagaaagtagctcccctgaaaatcaagctgggaggttttggttccaagcgtaagagatcctcgagtgaggatgatgacttagatgtggaatctgacttcgatgatgccagtatcaatagctattctgtttctgatggttccaccagccgtagtagccgcagccgcaagaaactccgaaccactaaaaagaaaaagaaaggcgaggaggaggtgactgctgtggatggttatgagacagaccaccaggactattgcgaggtgtgccagcaaggcggtgagatcatcctgtgtgatacctgtccccgtgcttaccacatggtctgcctggatcccgacatggagaaggctcccgagggcaagtggagctgcccacactgcgagaaggaaggcatccagtgggaagctaaagaggacaattcggagggtgaggagatcctggaagaggttgggggagacctcgaagaggaggatgaccaccatatggaattctgtcgggtctgcaaggatggtggggaactgctctgctgtgatacctgtccttcttcctaccacatccactgcctgaatcccccacttccagagatccccaacggtgaatggctctgtccccgttgtacgtgtccagctctgaagggcaaagtgcagaagatcctaatctggaagtggggtcagccaccatctcccacaccagtgcctcggcctccagatgctgatcccaacacgccctccccaaagcccttggaggggcggccagagcggcagttctttgtgaaatggcaaggcatgtcttactggcactgctcctgggtttctgaactgcagctggagctgcactgtcaggtgatgttccgaaactatcagcggaagaatgatatggatgagccaccttctggggactttggtggtgatgaagagaaaagccgaaagcgaaagaacaaggaccctaaatttgcagagatggaggaacgcttctatcgctatgggataaaacccgagtggatgatgatccaccgaatcctcaaccacagtgtggacaagaagggccacgtccactacttgatcaagtggcgggacttaccttacgatcaggcttcttgggagagtgaggatgtggagatccaggattacgacctgttcaagcagagctattggaatcacagggagttaatgaggggtgaggaaggccgaccaggcaagaagctcaagaaggtgaagcttcggaagttggagaggcctccagaaacgccaacagttgatccaacagtgaagtatgagcgacagccagagtacctggatgctacaggtggaaccctgcacccctatcaaatggagggcctgaattggttgcgcttctcctgggctcagggcactgacaccatcttggctgatgagatgggccttgggaaaactgtacagacagcagtcttcctgtattccctttacaaggagggtcattccaaaggccccttcctagtgagcgcccctctttctaccatcatcaactgggagcgggagtttgaaatgtgggctccagacatgtatgtcgtaacctatgtgggtgacaaggacagccgtgccatcatccgagagaatgagttctcctttgaagacaatgccattcgtggtggcaagaaggcctcccgcatgaagaaagaggcatctgtgaaattccatgtgctgctgacatcctatgaattgatcaccattgacatggctattttgggctctattgattgggcctgcctcatcgtggatgaagcccatcggctgaagaacaatcagtctaagttcttccgggtattgaatggttactcactccagcacaagctgttgctgactgggacaccattacaaaacaatctggaagagttgtttcatctgctcaactttctcacccccgagaggttccacaatttggaaggttttttggaggagtttgctgacattgccaaggaggaccagataaaaaaactgcatgacatgctggggccgcacatgttgcggcggctcaaagccgatgtgttcaagaacatgccctccaagacagaactaattgtgcgtgtggagctgagccctatgcagaagaaatactacaagtacatcctcactcgaaattttgaagcactcaatgcccgaggtggtggcaaccaggtgtctctgctgaatgtggtgatggatcttaagaagtgctgcaaccatccatacctcttccctgtggctgcaatggaagctcctaagatgcctaatggcatgtatgatggcagtgccctaatcagagcatctgggaaattattgctgctgcagaaaatgctcaagaaccttaaggagggtgggcatcgtgtactcatcttttcccagatgaccaagatgctagacctgctagaggatttcttggaacatgaaggttataaatacgaacgcatcgatggtggaatcactgggaacatgcggcaagaggccattgaccgcttcaatgcaccgggtgctcagcagttctgcttcttgctttccactcgagctgggggccttggaatcaatctggccactgctgacacagttattatctatgactctgactggaacccccataatgacattcaggcctttagcagagctcaccggattgggcaaaataaaaaggtaatgatctaccggtttgtgacccgtgcgtcagtggaggagcgcatcacgcaggtggcaaagaagaaaatgatgctgacgcatctagtggtgcggcctgggctgggctccaagactggatctatgtccaaacaggagcttgatgatatcctcaaatttggcactgaggaactattcaaggatgaagccactgatggaggaggagacaacaaagagggagaagatagcagtgttatccactacgatgataaggccattgaacggctgctagaccgtaaccaggatgagactgaagacacagaattgcagggcatgaatgaatatttgagctcattcaaagtggcccagtatgtggtacgggaagaagaaatgggggaggaagaggaggtagaacgggaaatcattaaacaggaagaaagtgtggatcctgactactgggagaaattgctgcggcaccattatgagcagcagcaagaagatctagcccgaaatctgggcaaaggaaaaagaatccgtaaacaggtcaactacaatgatggctcccaggaggaccgagattggcaggacgaccagtccgacaaccagtccgattactcagtggcttcagaggaaggtgatgaagactttgatgaacgttcagaagctccccgtaggcccagtcgtaagggcctgcggaatgataaagataagccattgcctcctctgttggcccgtgttggtgggaatattgaagtacttggttttaatgctcgtcagcgaaaagcctttcttaatgcaattatgcgatatggtatgccacctcaggatgcttttactacccagtggcttgtaagagacctgcgaggcaaatcagagaaagagttcaaggcatatgtctctcttttcatgcggcatttatgtgagccgggggcagatggggctgagacctttgctgatggtgtcccccgagaaggcctgtctcgccagcatgtccttactagaattggtgttatgtctttgattcgcaagaaggttcaggagtttgaacatgttaatgggcgctggagcatgcctgaactggctgaggtggaggaaaacaagaagatgtcccagccagggtcaccctccccaaaaactcctacaccctccactccaggggacacgcagcccaacactcctgcacctgtcccacctgctgaagatgggataaaaatagaggaaaatagcctcaaagaagaagagagcatagaaggagaaaaggaggttaaatctacagcccctgagactgccattgagtgtacacaggcccctgcccctgcctcagaggatgaaaaggtcgttgttgaaccccctgagggagaggagaaagtggaaaaggcagaggtgaaggagagaacagaggaacctatggagacagagcccaaaggtgctgctgatgtagagaaggtggaggaaaagtcagcaatagatctgacccctattgtggtagaagacaaagaagagaagaaagaagaagaagagaaaaaagaggtgatgcttcagaatggagagacccccaaggacctgaatgatgagaaacagaagaaaaatattaaacaacgtttcatgtttaacattgcagatggtggttttactgagttgcactccctttggcagaatgaagagcgggcagccacagttaccaagaagacttatgagatctggcatcgacggcatgactactggctgctagccggcattataaaccatggctatgcccggtggcaagacatccagaatgacccacgctatgccatcctcaatgagcctttcaagggtgaaatgaaccgtggcaatttcttagagatcaagaataaatttctagctcgaaggtttaagctcttagaacaagctctggtgattgaggaacagctgcgccgggctgcttacttgaacatgtcagaagacccttctcacccttccatggccctcaacacccgctttgctgaggtggagtgtttggcggaaagtcatcagcacctgtccaaggagtcaatggcaggaaacaagccagccaatgcagtcctgcacaaagttctgaaacagctggaagaactgctgagtgacatgaaagctgatgtgactcgactcccagctaccattgcccgaattcccccagttgctgtgaggttacagatgtcagagcgtaacattctcagccgcctggcaaaccgggcacccgaacctaccccacagcaggtagcccagcagcagtgaagatgcagactgataccacctccaccgctgagcagtgaccttcctcactttctcttgtcccagcttctcccctgggggcctgagagaccctcaccttccttctgcccatcttccatgttgtaaaggaacagccccagtgcactgggggaggggagggagtgaggggcagtggtgcccttcctgcagaagagacatgcagcagtagcgctggcgccatctgcaggagctggcgggctggccttctggaccctggcttctccccactgtaacgcctgttacacacaaactgttgtgggttcctgccaggcttgaagaaaatgatctgaattttttcctccttttggttttattttgttggtttattttgtgttttcttttctcctttttggggggtattcagagtgggctgggcccctgggcgagacacagctacctctgttggcatctttttaataccaggaacccagcggctctagccactgagcggctaaatgaaataaagtggaaaaaaaaaaaaaggaaaaaaccaaaagcataaaaaaccacagcaaatttcttgatgaaaattgaaaataaaagtttccttgtattttaaaaaaaaaaaaaaa

SEQ ID NO: 33 - DNA, 7896 bp, Homo sapiens
ctcggtgcggttccgccgggcgcgaggagccgccgagacctccgcctgcgaacaaagaggaggccgtgcggggcgcggcgcccgcggagcatggcggaccgcagcctggagggcatggcgctgcccctggaggtgcgggcgcgcctggccgagctggagctggagctgtcggaaggtgacatcacacaaaaaggatatgaaaagaagaggtcaaagttaattggagcctaccttccgcagcctccgagggtggaccaagctttgccgcaagaacgccgggctcctgtcactccttcctccgcctctcgctaccaccgccgacggtcttcagggtcacgagatgagcgctatcggtcagacgtccacacggaagctgtccaggcggctctggccaaacacaaagagcggaagatggcagtgcctatgccttccaaacgcaggtccctggtcgtgcagacctcgatggacgcctacacccctccagatacctcttctggctcagaagatgaaggctcagtgcagggggactcccagggcacccccacctccagccagggcagcatcaatatggagcactggatcagccaggccatccacggctccaccacgtccaccacctcctcgtcctctacgcagagcgggggcagcggggctgcccacaggctggcggacgtcatggctcagacccacatagaaaatcattctgcacctcctgacgtaaccacgtacacctcagagcactcgatacaggtggagagaccgcagggttccacggggtcccggacagcgcccaagtacggcaacgccgagctcatggagaccggggatggagtaccagtaagtagccgggtgtcagcaaaaatccagcagcttgtcaataccctcaaacgaccgaaacgaccacctttacgagaattctttgtcgatgactttgaagaattattagaagttcaacaaccggatccgaaccaaccaaagccggagggggcccagatgctggccatgcgcggagagcagctgggcgtggtcacgaactggccgccgtcgctggaggccgcactgcagaggtggggcaccatctcgcccaaggcgccctgcctgaccaccatggacaccaacgggaagcccctctacatcctcacttacggcaagctgtggacaagaagtatgaaggtcgcttacagcattctacacaaattaggcacaaagcaggaacccatggtccggcctggagatagggtggcactggtgttccccaacaatgatccggctgccttcatggcggctttctacggctgcctgctggccgaggtggtccccgtgcccatcgaggtgccgctcaccaggaaggacgcagggagccagcagataggtttcttgcttggaagctgtggagttactgtagccttgactagtgacgcctgccataaaggacttccaaaaagcccaacgggagagatcccacagtttaaaggttggccaaagctgctgtggtttgtcacagagtctaaacatctctccaaaccgccccgagactggttcccacacattaaagatgccaataacgacactgcgtatattgagtacaagacgtgtaaggatggcagtgtgctgggtgtgacggtgacgaggactgcgctgctgacacactgccaggccctgacgcaggcgtgtggctacacggaagctgaaaccattgtgaatgtgctggatttcaagaaggacgtcgggctctggcatggcatcctgacaagcgtcatgaacatgatgcatgtgatcagcatcccgtactcgctgatgaaggtgaaccctctctcctggatccagaaggtctgccagtacaaagcaaaagtggcgtgtgtgaaatcgagggatatgcattgggcattagtagcacacagagatcagagagacatcaacctctcctctctgcgaatgctgatagtggcggacggcgcgaacccctggtctatttcttcttgcgatgcatttctcaatgtcttccaaagtaaaggccttcgacaggaggtcatctgtccttgtgccagctcgccagaggccctcactgtggccatccggaggcccacggatgacagtaaccagcccccgggccggggtgtcctctccatgcatggactgacctatggggtcattcgtgtggactcggaagagaagctgtccgtgctcaccgtgcaggatgtcggcctcgtgatgcctggagccatcatgtgttcagtgaagccagacggggttcctcagctgtgcagaacggatgagatcggggagctgtgtgtgtgtgcagttgcgacgggcacgtcctactatggcctctctggcatgaccaagaacacctttgaggtgtttcccatgacaagctccggggctccgatcagtgaatacccattcataaggacaggcttgctggggttcgtgggtcccggaggcctcgtcttcgtggtgggcaagatggatggcctcatggtggtcagcgggcgcaggcacaacgccgacgacatcgtggccactgcgctggccgtagaacccatgaagtttgtctaccggggaaggatagccgtgttctcggtgaccgtgctgcacgacgagaggatcgtgatcgtggctgagcagaggcctgactccacggaagaggacagtttccagtggatgagccgtgtgctgcaggcgattgacagtatacatcaagttggagtttattgcctggccttggtgccagcaaacaccctccccaaaaccccgcttggtgggatccatttatcagaaacaaaacagctttttctggagggctctctgcacccctgcaatgtcctaatgtgcccccacacctgcgtcacaaacttgcctaagcctcgacagaagcagccagaaatcggccctgcctctgtgatggtggggaacctggtctctgggaagagaatcgcccaggccagtggcagagacctgggtcagatcgaagataacgaccaggcacgcaagttcctgttcctctcagaggtcttgcagtggagagcacagaccaccccggaccacatcctctacacgctgctcaactgtcggggtgcgatagcgaactcgctgacctgcgtgcagctgcacaagagagctgagaagatcgccgtgatgctgatggagaggggccaccttcaggacggcgaccacgtggccttggtctaccccccaggaatagacctgatagcagcgttttatggttgcctgtacgcaggctgtgtgccaataaccgtccgtcccccgcacccacagaacatcgcgacgacgttgcctaccgtcaagatgattgtggaggtgagtcgctctgcctgtctgatgacgacacagctgatctgtaagttgctgcggtccagggaggcggcggcggctgtggacgtcaggacgtggcccctcatcctggacacagatgatttgccaaagaagcggcctgcccagatctgcaaaccttgcaacccagacactcttgcatatctcgacttcagcgtgtccacaactgggatgctagctggcgtaaagatgtctcacgcagccaccagtgccttctgccgttccattaagctgcagtgtgaactttacccctctagagaagtggccatctgcctggacccttactgtggactgggatttgtcctctggtgcctctgcagtgtgtattctgggcaccagtccatcctgatcccgccctctgagctggaaaccaaccccgccttgtggcttcttgccgtgagtcagtacaaagtccgagacacgttttgctcctactccgtgatggagctgtgcaccaaggggctgggctcgcaaacagagtccctcaaggcgcgagggctggacttgtcccgagtgaggacctgcgtggttgtggcggaagagaggcctcggatcgcactcacacagtcgttctcaaagctgtttaaggacctgggccttcacccgcgggccgtcagcacctcgttcggttgcagggtgaacctggcgatttgcttgcagggaacctcaggacctgacccaaccactgtctacgtggacatgagagccctgagacacgacagagtccgcttagtggaaagaggatcccctcatagtctgcccctgatggaatcgggaaagatacttccaggggttcggattataattgccaacccagaaacaaaaggaccgctgggggactcacaccttggagagatttgggttcacagtgcccacaatgccagcggttatttcactatttacggagacgaatccctccagtcagatcacttcaactcaagactaagttttggagacacccagaccatctgggcacgcacaggctacttggggttcctgcggagaactgagctcacagatgcaaatggagagcgccatgatgccctctacgtggtaggggcactggacgaagccatggagctgcggggcatgcggtaccacccaatcgacattgagacctcggtcatcagagcccataaaagcgttacggaatgtgctgtgtttacctggacaaatttgttggtggttgtggttgagctggatgggtcggaacaagaagccttggacctggttcccttggtgaccaacgtggtcctggaggagcactacctgatcgtcggagtggtggtcgtggtggacatcggcgtcatccccatcaactcccgtggggagaagcagcgcatgcacctgcgagacgggtttttggcagaccagctagaccccatctatgtggcctacaacatgtagtctcgtctcttggcttccatggacttttctagagatgtagacattgttctccgtgtccactgaagcgtgcagacacagggcaacactcaccagaatacagccatttgtggtgagagtggaggaggaagaggaggaggaagaggacttctcacagcagccacgattggcatgggggtgaaatgtgaatttaccactgaatttcgctcagaaggactttggattactgccttcagtttgttggaaaagcccatttcaaaactttcttttcttttctttcttttttaattattggataataagtgctttcttcgtaaatgtggtattttgttaagccgaaatagcaattaaaaaaatatcctgccctccagatgggttcttttaaacaatttatgtagtgtgacaaagaattgttttctctgttttaatgtgtcatgaaatcttaatgacatggatctgttactaatttaagccattgctagatctcatccttttaggaaagtttgaggtacgagaaaaccttccaaatagcaccttccaattagataatagcagctttctttgtcagaaatgtgctgaagaaacaaaggctggtatacggccttcgaagttagtatagaatgagaagaaattataaataaggtgtatttcggcaattatcttgcaaatatctttgtactaaactaaaaagataaaataagttaacttcctcaatatgtaattatgtacaaaacgtttaatttattttgatctctttagaactataaaagagaaaaacattcaagaatattaaagtcttgtaatgtttgctaatataaaaaagtgttgtattatcttgcgtggatagtatcacaacaaatatatatatatgaaatataaattcactaatgaacaaaggagattttaaagtttaagatgcagaacttgtcacttgcatggtgtgccccccgtactcacatacactctgctgttgccagcagtcgcagaccgcaggagccctgtctaaaagtttcttctagaaccagagaccagcaagtgaaattattgccatctcaaggatggcaaaagaattcaaagctcaatgtgcactatttttttctttgctgtgggacaacagtgaatgtgtttatgccagcgtgtgctgatgatactgaggggctttaggttggcaaatagcactgttttcttagctgcaagaattcattgcacaatgtttttcatcatttttgttaatgtcatctttttttggtccttgctacgaaaaggaatgcgattctgtggtcattcgcactgggttgcattgattccccctctgatggccaatgtggagtggacaaagtgtccggaactcacatcggtgatcgtcccctcgtcttaagacccagcccgctctgtgtgagcctctggggctccctcgctcagtgagcacagttccccgggggttcatgccagagctccggctgaagcaagaagtcctccagctgcgtcgtttgccgcctgtggacgagtgcgccccagtttctgccctggcagctcctggccacaccttctcagagctcacctgtgcacttctaaattgaattggcccacggtgtccaaccaagaaggagcatctgcactccgagaaagatgtgttctgtaactgccccagtgtgaccccgcagtggctctcggtgctagatatgcatgactaagattgatgctgggcaaaatgtagatgatctttcattatgttgtgggcagcgtctttctctgcctttgctatatgcagtcagcagtaagccttttgctaaaagagttttgtttgacttctgagatccaaggctgattgttgttaaaaaaaaaaaaaaaaaaaaagtggcacatttaaaaaaatgtgtctgcatatgtggtgcatccttccatctccacaaaccatttgattcttgaaatattgtttgacctcattgctgtgtgtgaatatttctccacatgcttcagatgcacattcctagtctctgcttcctaaggggggaaccaccacacattggggggaaaaaagacattttcctacacccacccaccttgttgaaagggaggtaggtttggggcttcaggccaggcactgactatgaaacattagctgcagtgtgcaggacagctttgaggtccagctgaagtcaggaagcaaaacaaatgtagatgtcacttcaaacataatttcaactgtcaccagatcaactctacattcaaggagtgtggacgctgcagtgcagttgtgagggcagttagcagccgcctcttctgcatcctgtcaactctgattagttagagtttaggctcaaaagagttggtggactgagattgaaatttggttgtgcaagagaaaggaaaggagacacttagtaccaccagtttcagcaataaagaagggtcattctgtattcaaaattgtactgtagataaatcattcatgagattgtaaaaaatgtttgtcttgtgaccttgtgcttttgaagtcagacaaaaccgtgtaatcaacttgcacaaaaagagggtacacagtgaacatataaacacagacctaatcaaacaggagcagattcctcatggtgcttgtttattatatatatttaatcctgcttgacactttacccaagggagatggtcccttttatcagttgaatgttagcagcgttatttcagagtgtggtgactggttagagaaactcatgtactcaaccagccacagtttcaaacaaaatttttatgtgcaaaggacagcaaccttcttgtatgttaaaccaccagtacgctttgtacatctgtgataacgcctgttttatattcaaatgaacaaataaaagcttttatttttgttgctctgaaaatagcagtttcttaattggtcccctggaaagatgtctgggacagctttaatcccgggaaggaagtgactcctacagggaaatgtatctgactctgtttacataatttgttgcattacttagtacagataatcatactttgaaaaatgtttaaattttgatgtgggcatttattgctaaaaataattcctatggcaacaaatgttttgtgaaatgttttttttaattcttttaaatatatctaaatatatttgttcacattttgctgcaa

SEQ ID NO: 34 - DNA, 1587 bp, Homo sapiens
gggaccggaggcggcgcgggcggcggcggcgcagacaaaggcacgggcggcgtggagggcggcgcggagggcgcgggcccgggagccagggagcgagcggggcgcccggcagcgcggagtcagcgccgcgggggccgcacccgactcgcgcctggacactcgcggggcgccgacctggcagggggccaaaccagtgctcctgccacctctctggctgccccctagagcctgcccatcccagcctgaccaatgtccacagccagggagcagccaatcttcagcacacgggcgcacgtgttccaaattgacccagccaccaagcgaaactggatcccagcgggcaagcacgcactcactgtctcctatttctacgatgccacccgcaatgtgtaccgcatcatcagcatcggaggcgccaaggccatcatcaacagcactgtcactcccaacatgaccttcaccaaaacttcccagaagttcgggcagtgggccgacagtcgcgccaacacagtctacggcctgggctttgcctctgaacagcatctgacacagtttgccgagaagttccaggaagtgaaggaagcagccaggctggccagggagaaatctcaggatggcggggagctcaccagtccagccctggggctcgcctcccaccaggtgcccccgagccctctcgtcagtgccaacggccccggcgaggaaaaactgttccgcagccagagcgctgatgcccccggccccacagagcgcgagcggctaaagaagatgttgtctgagggctccgtgggcgaggtacagtgggaggccgagtttttcgcactgcaggacagcaacaacaagctggcaggcgccctgcgagaggccaacgccgccgcagcccagtggaggcagcagctggaggctcagcgtgcagaggccgagcggctgcggcagcgggtggctgagctggaggctcaggcagcttcagaggtgacccccaccggtgagaaggaggggctgggccagggccagtcgctggaacagctggaagctctggtgcaaaccaaggaccaggagattcagaccctgaagagtcagactggggggccccgcgaggccctggaggctgccgagcgtgaggagactcagcagaaggtgcaggacctggagacccgcaatgcggagttggagcaccagctgcgggcgatggagcgcagcctggaggaggcacgggcagagcgggagcgggcgcgggctgaggtgggccgggcagcgcagctgctggacgtcagcctgtttgagctgagtgagctgcgtgagggcctggcccgcctggctgaggctgcgccctgagccggggctggttttctatgaacgattccggcctgggatgcgggccaggctgcaggcggcatagttgggcccattcgtcctggaaagggactggggggtcccaacttagccctgggtgggccgggccgggctgggctggggtgggccccagtcggctctggttgttggcagctttggggctgtttttgagcttctcattgtgtagaatttctagatcccccgattacatttctaagcgtggcaaaaaaaaaa

SEQ ID NO: 35 - DNA, 1137 bp, Homo sapiens
actcgcgcccttgccgctgccaccgcaccccgccatggagcggccgtcgctgcgcgccctgctcctcggcgccgctgggctgctgctcctgctcctgcccctctcctcttcctcctcttcggacacctgcggcccctgcgagccggcctcctgcccgcccctgcccccgctgggctgcctgctgggcgagacccgcgacgcgtgcggctgctgccctatgtgcgcccgcggcgagggcgagccgtgcgggggtggcggcgccggcagggggtactgcgcgccgggcatggagtgcgtgaagagccgcaagaggcggaagggtaaagccggggcagcagccggcggtccgggtgtaagcggcgtgtgcgtgtgcaagagccgctacccggtgtgcggcagcgacggcaccacctacccgagcggctgccagctgcgcgccgccagccagagggccgagagccgcggggagaaggccatcacccaggtcagcaagggcacctgcgagcaaggtccttccatagtgacgccccccaaggacatctggaatgtcactggtgcccaggtgtacttgagctgtgaggtcatcggaatcccgacacctgtcctcatctggaacaaggtaaaaaggggtcactatggagttcaaaggacagaactcctgcctggtgaccgggacaacctggccattcagacccggggtggcccagaaaagcatgaagtaactggctgggtgctggtatctcctctaagtaaggaagatgctggagaatatgagtgccatgcatccaattcccaaggacaggcttcagcatcagcaaaaattacagtggttgatgccttacatgaaataccagtgaaaaaaggtgaaggtgccgagctataaacctccagaatattattagtctgcatggttaaaagtagtcatggataactacattacctgttcttgcctaataagtttcttttaatccaatccactaacactttagttatattcactggttttacacagagaaatacaaaataaagatcacacatcaagactatctacaaaaatttattatatatttacagaagaaaagcatgcatatcattaaacaaataaaatactttttatcacaacacagtaaaaaaaaa

SEQ ID NO: 36 - DNA, 1702 bp, Homo sapiens
gttaaccggaagtagacgtacctcacggaagccggctttggccctgcggctgctaccgtcgccgcggagaaattgttggatctggcagtctaggaatggttcatcaagaggaagaagttcgatgatgagctggtggagagcagcctggcaaaatcttctacccgggcaaagggggccagtggggtggaaccagggcgctgttcggggagtgaaccctcctccagtgagaagaagaaggtatccaaagcccccagcactcctgtgccacccagcccagccccagcccctggactcaccaagcgtgtgaagaagagtaaacagccacttcaggtgaccaaggatctgggccgctggaagcctgcagatgacctcctgctcataaatgctgtgttgcagaccaacgacctgacctccgtccacctgggcgtgaaattcagctgccgcttcacccttcgggaggtccaggagcgttggtacgccctgctctacgatcctgtcatctccaagttggcctgtcaggccatgaggcagctgcacccagaggctattgcagccatccagagcaaggccctgtttagcaaggctgaggagcagctgctgagcaaagtgggatcgaccagccagcccaccttggagaccttccaggacctgctgcacagacaccctgatgccttctacctggcccgtaccgcgaaggccctgcaggcccactggcagctcatgaagcagtattacctgctggaggaccagacagtgcagccgctgcccaaaggggaccaagtgctgaacttctctgatgcagaggacctgattgatgacagtaagctcaaggacatgcgagatgaggtcctggaacatgagctgatggtggctgaccggcgccagaagcgagagattcggcagctggaacaggaactgcataagtggcaggtgctagtggacagcatcacaggcatgagctctccggacttcgacaaccagacactggcagtgctgcggggccgcatggtgcggtacctgatgcgctcgcgtgagatcaccctgggcagagcaaccaaggataaccagattgatgtggacctgtctctggagggtccggcctggaagatatcccggaaacaaggtgtcatcaagctgaagaacaacggtgatttcttcattgccaatgagggtcgacggcccatctacatcgatggacggccggtgctctgtggctccaaatggcgcctcagcaacaactctgtggtggagatcgccagcctgcgattcgtcttccttatcaaccaggacctcattgccctcatcagggctgaggctgccaagatcacaccacagtgaggagtggtggcaggactcgtgggccctctccggcctgtttcccctgccactccagcccccttgagctgggaactcaggctcctggaaaaacctgggcagtgggaggctcagctgcgggccattgatttgagcctttgagggaggatagggctggcctttgtgaagccagcagaggctgagaacctcaggcttccctagatccagagcccctccccatcttcctctctctaaaaacaaccctaccccccattgccaccttcactcctgtgtctccagctgattagcctcagactcttcttttattgtttttcttttgtaaataaaaagcaccaggttccaaagtagtttaaaaaaaaaaaaaaaa

SEQ ID NO: 37 - DNA, 1496 bp, Homo sapiens
gactggaaaaccggaagtgaaatcgtggcagccgcctcggccgccgcaatgcagagagaggagaagcagcttgaggcatcattagatgcactgctgagtcaagtggctgatctgaagaactctctggggagtttcatttgcaagttggagaacgagtatggccggctgacctggccatctgtcctggacagctttgccttgctttctggacagctgaacactctgaacaaggtcttgaagcatgaaaaaacaccgctgttccgtaaccaggtcatcattcctctggtgttgtctccagaccgagatgaagatctcatgcggcagactgaaggacgggtgcctgttttcagccatgaggtagtccctgaccatctgagaaccaagcctgaccctgaagtggaagaacaggagaagcaactgacgacagatgctgcccgcattggtgcagatgcagcccagaagcagatccagagcttgaataaaatgtgttcaaaccttctggagaaaatcagcaaagaggagcgagaatcagagagtggaggtctccggccgaacaagcagacctttaaccctacagacactaatgccttggtggcagctgttgcctttgggaaaggactatctaattggagaccttcaggcagcagtggtcctggccaggcaggccagccaggagctgggacgatccttgcaggaacctcaggattacagcaggtgcagatggcaggagctccaagccagcagcagccaatgctcagtggggtacaaatggctcaggcaggtcaaccagggaaaatgccaagtggaataaaaaccaacatcaagtcggcttccatgcatccctaccagcggccctcctgcctgggtttcattctggctatccctctaaggcgcaaggtgaagaagcttctgggccaggaaggaaaaaaaaatgcccacctgcagctctggtgaagcttgggcctgctctcctttccatcctctaaggagccaacttggcttttacctgtcaaatagtcataaagtcccctatcctttaccccaccttatacacacgaggctttctcaggaagtggctctgccaggcaggactatgtgggaaagggtttttccttagcacacgaaaaagccccttcccctggattcatgtttcttattttggagggagaagggaattgcacttcacactgccatcagggtttagttgacctcataatggtgcccactttctcgactttggccaggatttccttcaaagaaaacgactttccttcatttccctaagcctgtggcccaaatggtggaccagaatgatggtgggagggggcaacccccagtagctttgcctgcttttataaagttgaacaaattgaatttagacattcaggctaacctgcctttcttagtactcctttgttggcatgggcaggggttgagtcagcagaagtggaccaaaggattcctctgaataaagttatttaaattgatgttcactg

SEQ ID NO: 38 - DNA, 1622 bp, Homo sapiens
gtgaggacccttgacctctggcccaagatggtggcgcccagagcttcgctcttgctgctcccctgaggtgaactgaagccagcagccccgcatcatgtcaaagctcggccgggccgcccggggcctcaggaagcccgaggtcggcggtgtgatccgggcgatcgtgcgggcaggcctggccatgcccgggcccccactaggcccagtgctgggtcagagaggcgtttccatcaaccagttttgcaaggagttcaatgagaggacaaaggacatcaaggaaggcattcctctgcctaccaagattttagtgaagcctgacaggacatttgaaattaagattggacagcccactgtttcctacttcctgaaggcagcagctgggattgaaaagggggcccggcaaacagggaaagaggtggcaggcctggtgaccttgaagcatgtgtatgagattgcccgcatcaaagctcaggatgaggcatttgccctgcaggatgtacccctgtcgtctgttgtccgctccatcatcgggtctgcccgttctctgggcattcgcgtggtgaaggacctcagttcagaagagcttgcagctttccagaaggaacgagccatcttcctggctgctcagaaggaggcagatttggctgcccaagaagaagctgccaagaagtgacccttgccccaccaactcccagatttcaaaggaggtagttgcaaaagctgtgcccaaggggaggaaggaggtcacaccaatatgatgatggttttcatgactttgaatgatatatttttgtacatctagctgtatcgaggcatcaggcctgaataaacatcctttcttacccactgtcatcttctatcttgggacctcagggaagggaaccagtactggtggtagccaatatgggcagacattaggaaattggggtcttcatactgcttctcagatgtgcaaactgaggttcagccaagcaaagtaacttgcccaggtccttttttttcttttttaagttataattttgttttattgcccaggttctgaattggtgccagaggtaggaatagaacccaggccttctcatttgaaatcctgtgttcttcccctccccagggtgggaactatggttgctagggctgaggtgtattgcttacttcttccatcaaaaatctcttttatctctgaacaacttgccacctctgcagaaacaagtccctgtggagatctcagttcagccccaggcagggttactacatggagtacccagatcccaggggctacttcaggcccttctactaagctcctgaccctggctctgggtcagatgttggctgaacatgaactattgtagggctgacagctacagaccacagaaagagcaaagcttcagtaggttcctgcctgatggagaagtcctcgggaagcccttggccttctatttcctcattgtcctttcagagaagagagcaggagttgggggagaaaggagattcgcatttactgaccatctgttatgtgctagacacttcattttacactgagaaaatatggaaagcatagataaacacctaaaagaaaataaaaacctcatgttatcccaccacccaaaaaaaaaaaaaaaaaa

SEQ ID NO: 39 - DNA, 2479 bp, Homo sapiens
atgatgttttacggaagccgatagtccttgctcagcggcaccccgtccttccggctctcggctttgccacaaagcttcccgaagacgcggccgctacccggagacgcggtcgccacccagaagcgctctcccgggaagccccgctcgtgggaccgcgccacctgcgccgcctctgcggcccgcagcccgacgggcgccgccatgttggggtcctagcgagggacgcgtaggtgtcttcataagatgccggggcagcggcgcgcgctttcccccaagatggcgtccatgcgggagagcgacacgggcctgtggctgcacaacaagctgggggccacggacgagctgtgggcgccgcccagcatcgcgtccctgctcacggccgcggtcatcgacaacatccgtctctgcttccatggcctctcgtcggcagtgaagctcaagttgctactcgggacgctgcacctcccgcgccgcacggtggacgagatgaagggcgccctaatggagatcatccagctcgccagcctcgactcggacccctgggtgctcatggtcgccgacatcttgaagtcctttccggacacaggctcgcttaacctggagctggaggagcagaatcccaacgttcaggatattttgggagaacttagagaaaaggtgggtgagtgtgaagcgtctgccatgctgccactggagtgccagtacttgaacaaaaacgccctgacgaccctcgcgggacccctcactcccccggtgaagcattttcagttaaagcggaaacccaagagcgccacgctgcgggcggagctgctgcagaagtccacggagaccgcccagcagttgaagcggagcgccggggtgcccttccacgccaagggccgggggctgctgcggaagatggacaccaccaccccactcaaaggcatcccgaagcaggcgcccttcagaagccccacggcgcccagcgtcttcagccccacagggaaccggacccccatcccgccttccaggacgctgctgcggaaggaacgaggtgtgaagctgctggacatctctgagctggatatggttggcgctggccgagaggcgaagcggagaaggaagactctcgatgcggaggtggtggagaagccggccaaggaggaaacggtggtggagaacgccaccccggactacgcagccggcctggtgtccacgcagaaacttgggtccctgaacaatgagcctgcgctgccctccacgagctaccttccctccacgcccagcgtggttcccgcctcctcctacatccccagctccgagacgcccccagccccatcttcccgggaagccagccgcccaccagaggagcccagcgccccgagccccacgttgccagcgcagttcaagcagcgggcgcccatgtacaacagcggcctgagccctgccacacccacgcctgcggcgcccacctcgcctctgacacccaccacacctccggctgtcgcccctaccactcagacacccccggttgccatggtggccccgcagacccaggcccctgctcagcagcagcctaagaagaacctgtccctcacgagagagcagatgttcgctgcccaggagatgttcaagacggccaacaaagtcacgcggcccgagaaggccctcatcctgggcttcatggccggctcccgagagaacccgtgccaggagcagggggacgtgatccagatcaagctgagcgagcacacggaggacctgcccaaggcggacggccagggtagcacaaccatgctggtggacacagtgtttgagatgaactatgccacgggccagtggacgcgcttcaagaagtacaagcccatgaccaatgtgtcctagaaccacctgcctcacagctggccgtcacttgtgggggtccacgggacgatggctttgccagcttaaagtaaccggatggcggacacctggcccccgaggtcccccggccgccgccctgctgctgacccagcctgttttaagttctggatgcatttctctggggtatttggggcttatttttaaaattttaatatgggttcttttttgtgtgatttaagacactttttggactcaacgttacatttttgaatgtagtaagtaaattaaccaaaaaagttacaacttcctaattttagtgacagctctgcctgttagactcttactttttaaaatcttttctattttccctcgctggggcagtgccctcctacccccagggttgaggggaccaaggtggcacggtggtactgggggtgcggcagggacacccgaccacaccagagcgtgggagacggtgggccttgtcccctgcctgtgcctgcctgggagttttgtattcatcttttgtatagttgtggacatttaagacagtctttgggtacctattttcattgtaaaactatctgaaccattaaagtcgagcttttctaaagaaagccaccataaaaaaaaaaaa

SEQ ID NO: 40 - DNA, 2526 bp, Homo sapiens
ggaggcgtcggccacgttcagcggacacgggagcaagatggcgattccgggcaggcagtatgggcttattttgccaaagaaaacacagcagttgcaccctgttttgcaaaaaccatcagtgtttgggaatgattctgatgatgatgatgagacctctgtgagtgaaagccttcagagggaagctgctaagaagcaggccatgaaacagaccaaactggaaatccagaaggcccttgcagaagatgctactgtgtatgaatatgacagtatttatgatgaaatgcagaaaaaaaaggaggaaaataatcccaaattgcttttggggaaagacagaaagcccaagtatattcacaacttgctaaaagcagttgagatcagaaaaaaggaacaggaaaaaagaatggaaaagaaaatacagagagaacgagaaatggaaaagggggagtttgatgataaagaagcatttgtgacatctgcatataagaaaaaactgcaagagagagctgaagaagaagaaagagaaaagagggctgctgcactggaagcatgtttggatgtaaccaagcagaaagatctcagtggattttataggcacctattaaatcaagcagttggtgaagaggaagtacctaaatgcagctttcgtgaagccagatctggtataaaggaagaaaaatcaaggggcttctccaatgaagtaagttcaaaaaacagaataccacaagagaaatgcattcttcaaactgatgtgaaagtagaggaaaacccagatgcagacagtgacttcgatgctaagagcagtgcggatgatgaaatagaagaaactagagtgaactgcagaagggaaaaggtcatagagacccctgagaatgacttcaagcaccacaggagtcaaaaccactctcggtcacctagtgaagaaagagggcacagtaccaggcaccacacgaaaggatcacgaacgtcgagaggacatgagaaaagggaagatcagcaccagcagaagcaatccagagaccaagagaaccattacactgaccgtgattaccggaaagaaagggattctcataggcacagagaggccagtcatagagattcccattggaagaggcatgaacaggaagataaaccaagggcgagggaccaaagagaaagaagtgacagagtatggaaaagggagaaagatagggagaaatattcccaaagagaacaagaaagagatagacaacaaaatgatcagaaccgacccagtgagaaaggagagaaggaagagaaaagcaaagcaaaggaagagcatatgaaagtaaggaaggaaagatatgaaaataatgataaatacagagatagagaaaaacgagaggtaggtgttcagtcttcagaaagaaatcaagacagaaaggaaagcagcccaaattctagggcaaaggataaatttcttgaccaagaaagatccaacaaaatgagaaacatggcaaaggacaaagaaagaaaccaagagaaaccctctaattctgaatcatcactgggagcaaaacacagactcacagaggaagggcaagagaagggtaaagaacaagagagaccacctgaggcagtgagcaagtttgcaaagcggaacaatgaagaaactgtaatgtcagctagagacaggtacttggccaggcagatggcgcgggttaatgcaaagacctatattgagaaagaagatgattgatggctaccccaagagaaagatttaaggaagcacagaaaactgtaattcctggaacctgctgcgtaaaaccataaaggagtgtgttaccagtagtttggagggcatttttaaatttattttcaaaattttaagttaaaagtcagtcttacagcttggatgtttggatgtggatgtttggctgaatttatatatagtgtgtactcatcaataccacattctttgttgtattcaagaaccgttaagagtgtgctaattccctgtaggtacataatgaggaaaatttgctccactacaaccattaaaaaataattttggccagatacggtagctcgtgcctgtaataccaacattttgggaggccaaggcagaaggatattgaggctaggcattcaagaccagcctaggcaggataataagaccttgtctctatttaaaaaacaaaaagcctagcatggtagtccatgcctgtagtcccagctgttcgagaggctgaggcaagaagatcacttgagcctaggaatttgatgttacagtgaggtatgatcatgccactgcactccaacctgggcaacagaatgagaccctgtctctaaaaaattttttttaaataaataatttaactcttctaataatgttttgttgcaggaaatgtatttcagataaaatatggatttgaaaaacagaaaatatactttatgttctgaaatttgtatttaagtataaaatgtgaatcatcttgtctaaatagcttacagcatagttggcttaaatgaaaataaaatgatatgcttatacattttaaaaaaaaaaaa

SEQ ID NO: 41 - DNA, 1384 bp, Homo sapiens
accgttcttttaactgcgcaggcgcgccggaagcacctagagagcggcgcgtgcgcagcgggagtcgaagcggagatcccggggtcgcgcgagagccgcaagcggagttggtgggcgctatgctatcacccgaggcagagcgagtgctgcggtaccttgtagaagtggaggagctcgccgaggaggtgctggcggacaagcggcagattgtggacctggacactaaaaggaatcagaatcgagagggcctgagggccctgcagaaggatctcagcctctctgaagatgtgatggtttgcttcgggaacatgtttatcaagatgcctcaccctgagacaaaggaaatgattgaaaaagatcaagatcatctggataaagaaatagaaaaactgcggaagcaacttaaagtgaaggtcaaccgcctttttgaggcccaaggcaaaccggagctgaagggttttaacttgaaccccctcaaccaggatgagcttaaagctctcaaggtcatcttgaaaggatgagactcaagaaccaagatgggggaccagcaaccccccagggtcatggaggacccaggaccctccaaccttgacacctgtaaggacaggatctgccctgtaaggggccagccgtcaggaatctggccatgaaaacctctttgtagtgcttggctactctgtgatggcaggagggaaccttcagcctgtctggctgctggacctggacaccagggctcggtggacacaagatctattgacgggccttggtagccaccagtgggtgtgtggggcagtggctgtgggggtgtaagaatgactgcaacaggcacttcccaacaatggcctgctgttcacatggaccctgagcaaggaaggagggagggaggggcagagtggagtgtcattccagcattcctctcagaagggagagaggttttcaggctggtgccatgcgattggaataaagcaggaggctcatgggtggttgctgaatgaagaacagaatcttggtgctttgtggctcaccacagccatctgtggggcaggcacacacacctcccgccagctccaattttgcactttttccctgcttgattccaagagtaggtgctgcctagcagcccttcgtggccactctttactcaggagggccttgcagagtcctgcaccaggcctgggtgagtggatgcgcctcttaccatatgacacgtgtcaagatgcccttccgccccctctgaaagtggggcccggccagcactgctcgttactgtctgccttcagtggtctgaggtcccagtatgaactgccgtgaagtcaaaactcttatgtgttcattaagggctcaataaatgttagctgaatgaatgaatagcaaaaaaaaaaaa

SEQ ID NO: 42 - DNA, 8210 bp, Homo sapiens
gctagggacgggagcgcgcgcgggagctagagagcagtggtctcggcgctcgtccggcccgcagcttcgggtcctcaggcggctgttgctccggaacgggtggttggggaggggggggtggggggactctagacagctgaggcgcgaaagcgatgagtcctcggctcttcctcctccttctccgggacccgctctctgcctccctctccaacgcccggatgatctgagccgcgagggcgccgacagccgggggcccggacgcagcccggctcctcccctcctccgccccttccccagcctgacctggcccgccgctgcagcggtgacccctcccccggctgccgccgtcgccgccgcggtgaccccctccccggctgccgccgccgccgcctcggccgaccagggacctgcccgcctgcggctgctccggacctagaggatcaagacataatgggagcatttttagacaagccaaagatggaaaagcataatgcccaggggcagggtaatgggttgcgatatgggctaagcagcatgcaaggctggcgtgttgaaatggaggatgcacatacggctgtgatcggtttgccaagtggacttgaatcgtggtcattctttgctgtgtatgatgggcatgctggttctcaggttgccaaatactgctgtgagcatttgttagatcacatcaccaataaccaggattttaaagggtctgcaggagcaccttctgtggaaaatgtaaagaatggaatcagaacaggttttctggagattgatgaacacatgagagttatgtcagagaagaaacatggtgcagatagaagtgggtcaacagctgtaggtgtcttaatttctccccaacatacttatttcattaactgtggagactcaagaggtttactttgtaggaacaggaaagttcatttcttcacacaagatcacaaaccaagtaatccgctggagaaagaacgaattcagaatgcaggtggctctgtaatgattcagcgtgtgaatggctctctggctgtatcgagggcccttggggattttgattacaaatgtgtccatggaaaaggtcctactgagcagcttgtctcaccagagcctgaagtccatgatattgaaagatctgaagaagatgatcagttcattatccttgcatgtgatggtatctgggatgttatgggaaatgaagagctctgtgattttgtaagatccagacttgaagtcactgatgaccttgagaaagtttgcaatgaagtagtcgacacctgtttgtataagggaagtcgagacaacatgagtgtgattttgatctgttttccaaatgcacccaaagtatcgccagaagcagtgaagaaggaggcagagttggacaagtacctggaatgcagagtagaagaaatcataaagaagcagggggaaggcgtccccgacttagtccatgtgatgcgcacattagcgagtgagaacatccccagcctcccaccagggggtgaattggcaagcaagaggaatgttattgaagccgtttacaatagactgaatccttacaaaaatgacgacactgactctacatcaacagatgatatgtggtaaaactgctcatctagccatggagtttaccttcacctccaaaggagagtacagctcaactttgttgaaacttttaacatccatcctcaactttaaggaaggggatatgacatgggtgagaatgattacatcagagaacttcagcagtacaacagctagcccagaactgatttttttttttttttttgtaaatttgagacttatgtaagcgtgatttcaaaccataattcgtgttgtaaatcagactccagcaatttttgttgtatgattttgtttttttgtaaagtgtaattgtccttgtacaaaatgctcatatttaattatgaactgctttaaatcactatcaaagttacaagaaatgtttggcttattgtgtgatgcaacagatatatagccctttcaagtcatgttgtgtttggacttggggttggaacagggagagcagcagccatgtcagctacacgctcaaatgtgcagatgattatggaaaataacctcaaaatcttacaaagctgaacatccaaggagttattgaaaactatcttaaatgttcttggtaggggagttggcattgttgataaagccagtcccttcatttaactgtctttcaggatgttccttcgttgtttccatgagtattgcaggtaataatacagtgtattcataagaatctcaatcttggggctaaatgccttgtttctttgcacctcttttcaagtccttacatttaattactaattgataagcagcagcttcctacatatagtaggaaactgccacatttttgctatcatgattggctgggcctgctgctgttcctagtaagatattctgaattccattttatcaataaagcttgatttaacaaacaagaaacttaatcatgtatgtgtaattcctcttttaccctggccttttaaaacactgtgccgttgtaatgagacgtttctcatagggaaagatgttagtctcttttaattggacaacactgtcactcaaggcatagatgaaactttccttccattagaaagactaaaagatttaattcttggttgtaccttaatctattttttaaataggtttctttcaggctgcttatttttcattaagatgtgtatcagcttggatttgcctactgtttaattaaaatatttattgtcaaagtttgacaatctaacactctatggtaggggtgtgtgtgtgtgtgtttgtgagtgtgtgtttgcctgtgatttttaattggcccatgtctttagaatccaagtggttaagatgtatttgtgatttgaaatatagcatgttgataatatttagctgttggcctttacaaataactttcaaagcttaaggaattgtagatataaaaataacctaatttaatttaggcttaaattcctctgattaagcatgtgaaagtaagttttaaaatctgtcgcattgaaaagattactgttccgtgcccttctgtatttttgtctctttaggttgaatattgtatttatcaccatgtaatcattcagtaggcagattcccactagaaaactgttgaaatgtaagactaaaatacaacattgaatacaaaatcaaaattttgtgtataaaaaccagtatagtccattttgttatatttgttttttccctaacttggaaatatacatatttgtatatatagccttaaaattaatgtaaagttaggggagtagtggggaaagtaatgtgaaatgtctcagatttaagtagttaaataccagcaaaatcttttcattatccctcttattttgtgaggtgattaaatgtaacttaattgtatttaatttatatcttattccagcatgaatgaggaaaaactgaagtactatttatatttagaaattcatatcagttgaaattacagaaccaattccatacttacaataaatacttaatgtctaaatctgtggtagagtgcgaagtatgataatgttctaagttatggctttgcaagcatctaaatgtgcatttaatgaataccagtgcttctagtatagactaattaccagacatactggtactgaaagctaaatccctattataacaaaccagttccttaatattttaagtagactgacaactttagttccagaaattgcaaaactttgaactggactgtgtaatcttttgagatgcaaaacttaagtcacaagtagagtatgtgatggaaagctgtatttcaaaccataacagcatatttagagccttttttttttgagtctttaaacaagagaaaattaaaatattcctgtcaaaattattagtattgaaattaggcttggacacgagagagaaccgtatttgagtgatgtgagaagactaaatcttttccacatgagtcagcactgccatactaataatttttttactataaaaatacaggaaggaagtatacattataacagcagactgtgtgtgttcctgattcctggaggtaatagtggggggaaaccaaccatactttttaaaggcacttttgcacctctattgtgcacttcattcttgtaccacttaaattcttcacccccatcccctttttttgtgctaattagcatctcagggcaatgcctcaaaaatgtttgatgtgttctgttctttggagggaaaaagttcttatgtgatgataatatagtactcaaaatatacttttatcatttaaatgtcttatttgctgctatgaataggaaataacattttgtatagcaggctctgttttaccctaacattaaaaaatttcactgatctttctttcattaacagggtagaatctcctaatttccactttcttgggaatatacttttatagacaatagaagcagttctcaatattagcatatactttaaaaaatcaaagtgataacttaattcagctttggaagtatctcaaacatatttttactttatagtgcattaacttgcttctagagtacttaatgcaactgctctagccacttaattttttatactaatctcaacattaagaaatttggattaagtaataaattagttatgtaattcaagtaatctgaattacagcagtacttttagtgatcattcataggactatatattaacccagctaataactcagtttttttacaaaatgtttcgagtattattggtaaaacactgttctaggctaagcacattgggactgtaaagaaatgagtagatccttggcttcaagtttacatctggacaatttataatctagtgtatgttagtattataactggatcactcatcaaaaaatatatatatatatctattgcccacctgctatctaccaggtacttagctgatcaaggcaggcccctgccctaaagaccttgtttatacttcctttactcacctgaaaactgttctccagtttattttcttctctctaaagttaaagagtaattcagaagaaaattttgcttagcataagaataaaattggactgaagaggcttaagcccattcagtatccttgattgcatttatccaacggcctttattcttcctgctgacagcagtaactcagaggaataggtagtagatttctgaaaattatccagccatggaaatgtaggtggggtttgagtttaaggcatttaaaaatgtaaatatctctagctaaatttatcttaagtagaactctgtgtttttgtaacacactgccagtgttaatatcaaattttagccaaattattactatgtgttttaatattttaaaataatttcactgcccatctttactggacaaactcatttggagttcaacttgtgatttctgaaagaactgatgaaattgggtactgctttttttctccatttttcgttttgttttaattttgaatttcatggtatatacttttagttcaaactcagctgtttgtacagtattgtattaggatttggtattagaaaagatgtgtaaatatcttagtatataattgtttctcatttgaggtttttcttctaagggaccttaaagagttttatatacttttgctcacagaaactgctggtgagattaccattttttgagtatctagtcttctagtttttcttttaggcattaggaagccttctttagagttcaaaattttagaagcctaatttgctcttacttccttcaattatgtgccatgtgttttggtttgtatatgttttaaattgtatatttccttggaatatgcttgaaatatttaagaatacattttcaaaatgtataatactgtattgttttgttgatcagaataataagtctcagttaaatgtttgttattactgatagtcaaaatgctcaatagaaatgatgagaggcattggttccaattcattgtcaaatgaacgttttctaattttgttcacagattctttccctttcgattgttctgtatgttaagatagtggcttctgctctcactgttttcctatttatattactagcaggtaggagtgctaattagaaaaacttagatggtattgaaattacagttgacaacttatatttttatgagatggagaaaaaagattaagttgatataacaacaaagtggactttttttcttccttatcctgcacgaaatattgcccttgtttcctctactttcctcttggtgttttctctttttttcaaacagaaacaggccaattccattttcttgagcaagaaagcttagtgtgttacttcatcaaggccagctaatactgtgttaaaccgggctgaaaatgagaaaacttgggagatggaggaatggggaaatggcagtgggataggtagggaaggattactcttaattgttttaaaagccataggaaagtcttccttgtacgtggctgtaaatttataagaactattgtgtcacataaaccaacaagaatgaacctttgctgcttcagataatttgatttttccagcaaggaaattaataagttactgattcttcagcatagaaacaactgagaagaattaatgcaatgtttcttcactagaaaacccaacccttcatttcttttcattgctccaaaacccagttttcaactaatggttttctcattaaactaaatgtttagaaaagttgtttagagtttttctttttcttttacatagtcctcctgatccagtataagactatttagtaacgtgcatttgtatggtactatctaaagtaagttagattgatgtaagagatcgggtagctgcggaacaaaattagttatatcctaattaggtacagtgaatgacacaaaatcattttagcaatgcttcttaaccttttggggtcacaggcgttttgagactgatgaatcctagggacttatttacccaggaaaatgcgtatataacatacatatctccctaaagtttacaatattgtagtggttcatgggccccctggttaagagcccattctaaagtacaatagggcatcatcccttttcctgcaaagcccaaaagtatatttctagggcatgaaaataacttgagtctattttaaggaattgtttcactctagaggtagataggggacctggctagaatctgacattaaaatatactttttaaaaaatattatatttggggtggggaaagtgattaaaaggtgaaaaaaaaacatagtattcagaagttttggaggttaatgtctttctctaagatttgccactttagaaattcaacagaaaagaggtaaaacagaaatggaatgtatctggaacatttttggcctccatagtgcagatatactatattaacaagtaatacatttatttacctgtcagatctccaggttttaagattttgagctttctagtattaggattcattaaatgttcaattcatttcatattctaaggaattaggttatttacttactaattcaggatgttaaaataacatccaagtcggacaaccaccaccaatgcacacagttaatgagatttctaaaatataataagtacaatgtaacaaacgtatagaattttgcatttgttgccaaaattagatgtttaatgacagcttatttaattcccatttgtgggacttctggaacatagaaaccattatcttacctggttatcccttgactaaatagcatatctgcaggaaaatatcttgtttgtagtgatatgccccaatagtgattgatttcactcttgaaatgagttatatcacttaatttgtataaatgttatgagtggagagacatgtacatgttaaaagcatgttgcattatatattcattttttaaactctataaatgttaagaataatataattgcagaaatatttttcttaaatacaatgtgtaacaaaattctccgtagcaactcacccactttgcagtttatgtgatccacacttttaaagaaattccataaatgtatattttgtattatgtattatttcctggtccaaagaaaatatgtgaattcagttctaactttaagaatgtactgtttgttttcaagttcattgaaaaattgcattcagcctgcgaatggttgcagattgtatgttagatgaaaagtagaaataatttctagtttggaaaactggtgccactaaataaacaggcaattacataaaaaaaa

SEQ ID NO: 43 - DNA, 2166 bp, Homo sapiens
acgacacttgtgcggcagcggcggcggccacccggcgctccttcgcgacggttcggccgggtgccgctggcggccgttgccagggtaggggtcgctttgcggcatggcgatggcggagggcgagaggactgagtgtgctgagcccccccgggacgaacccccggctgatggagctctgaagcgggcagaggagctcaagactcaggccaatgactacttcaaagccaaggactacgagaacgccatcaagttctacagccaggccatcgagctgaaccccagcaatgccatctactatggcaaccgcagcctggcctacctgcgcactgagtgctatggctacgcgctgggagacgccacgcgggccattgagctggacaagaagtacatcaagggttattaccgccgggctgccagcaacatggcactgggcaagttccgggccgcgctgcgagactacgagacggtggtcaaggtgaagccccatgacaaggatgccaaaatgaaataccaggagtgcaacaagatcgtgaagcagaaggcctttgagcgggccatcgcgggcgacgagcacaagcgctccgtggtggactcgctggacatcgagagcatgaccattgaggatgagtacagcggacccaagcttgaagacggcaaagtgacaatcagtttcatgaaggagctcatgcagtggtacaaggaccagaagaaactgcaccggaaatgtgcctaccagacagagaagattacagtatgtggggacacccatggccagttctatgacctcctcaacatattcgagctcaacggtttaccctcggagaccaacccctatatatttaatggtgactttgtggaccgaggctccttctctgtagaagtgatcctcacccttttcggcttcaagctcctgtacccagatcactttcacctccttcgaggcaaccacgagacagacaacatgaaccagatctacggtttcgagggtgaggtgaaggccaagtacacagcccagatgtacgagctctttagcgaggtgttcgagtggctcccgttggcccagtgcatcaacggcaaagtgctgatcatgcacggaggcctgttcagtgaagacggtgtcaccctggatgacatccggaaaattgagcggaatcgacaacccccagattcagggcccatgtgtgacctgctctggtcagatccacagccacagaacgggcgctcgatcagcaagcggggcgtgagctgtcagtttgggcctgacgtcaccaaggccttcttggaagagaacaacctggactatatcatccgcagccacgaagtcaaggccgagggctacgaggtggctcacggaggccgctgtgtcaccgtcttctctgcccccaactactgcgaccagatggggaacaaagcctcctacatccacctccagggctctgacctacggcctcagttccaccagttcacagcagtgcctcatcccaacgtcaagcccatggcctatgccaacacgctgctgcagctaggaatgatgtgaggtgacgggcggggcggcctgcatcccagggcccctccaatcccaccggacccaggccctgggctaggggcagagcaggccccgccccagggcaatgttggacccccttttactttgtaaagtttgtatttattcccctttaggtttgcagagggggtaggggcagagtcaggggctggccagagggtctgctccctggacagagaggaaggaggtggagcagctggggctgggggcacagcctgggcattctgtggggaggccgtcctcggggtggggtggggccgagtggctgccctgcccccctcatttgcatggctcctcccccactcaagcaatagggccccgccataggaagacccccagagagagggtcagcaggggggccccgcctgcgcctcccctcctatagccccatggtggggctaggctggggctcacccccctccccagctattttatgtctgtaattaaatatgttaaaataaagtcattatcggaagtcagcttgtctctggatggtggagccgaaggagctgcccgggttgggttacgcctgctcaggagatccggagggtggggaggccgcaaagtcccgctggccgggcccacccagctctgggctgacc

SEQ ID NO: 44 - DNA, 3227 bp, Homo sapiens
attagagcgtgtctgggagcaggttaaactttctcctaggtggtgatgtgcctccaggtgagcgcacaggctttgcagaaaccccagcatgacaagcaagtaggaaggtgacattgttgtttgagaaaagccagtgacccggttgggacggagacacgatggggagccggtctccaacagcatgcccttcctgaaggccaacgaggtgacggacagcgcgtacatgggctccgagagcacctacagtgagtgtgagaccttcacggacgaggacaccagcaccctggtgcaccctgagctgcaacctgaaggggacgcagacagtgccggcggctcggccgtgccctctgagtgcctggacgccatggaggagcccgaccatggtgccctgctgctgctcccaggcaggcctcacccccatggccagtctgtcatcacggtgatcgggggcgaggagcactttgaggactacggtgaaggcagtgaggcggagctgtccccagagaccctatgcaacgggcagctgggctgcagtgaccccgctttcctcacgcccagtccgacaaagcggctctccagcaagaaggtggcaaggtacctgcaccagtcaggggccctgaccatggaggccctggaggacccttcccccgagctcatggagggcccagaggaggacattgctgacaaggttgtcttcctggaaaggcgtgtgctggagctggaaaaggacacggcagccaccggtgagcaacacagccgcctgaggcaggagaacctgcagctggtgcacagagcaaacgccctggaggagcagctgaaggagcaggagctgagagcctgcgagatggtcctggaagagacccggcgtcagaaggagctcctgtgcaagatggagagggagaagagcattgagatcgagaacctgcagaccaggctacagcaactggacgaggagaacagtgaactccggtcctgcacgccctgtctgaaggccaacattgagcgtctggaggaggagaagcagaagctgttggatgagatagagtcgctgacgctgcggctcagtgaagagcaggagaacaagaggagaatgggggacaggctgagtcacgagaggcaccagttccagagggacaaggaggccacccaggagctgatcgaggacctccgaaagcagctggagcacctgcagctcctcaagctggaggccgagcagcggcggggccgcagcagcagcatgggcctgcaggagtaccacagccgcgcccgggagagcgagctggagcaggaggtccgcaggctgaagcaggacaaccgcaacctgaaggagcagaacgaggagctgaacgggcagatcattaccctcagcatccagggcgccaagagcctcttctccacagccttctctgagtccctggctgcagagatcagctccgtctcccgagatgagctcatggaggcgattcagaagcaggaggagatcaacttccgcctgcaggactacatcgacaggatcatcgtggccatcatggagaccaacccgtccatcctggaggtcaagtagaggcaggaaggtccagcctgagctggattcgggactccaacaccctggagtggttccgtcagaccatgaggagccaagaccagcaggtcccacagccgacagtgcccagagcatgcagggaaccctcgtgcagctgagctggggccgccaaagaccggggctgccaaaggggcagagggtggtggagaggagagggagaaagggaagtcccagggcccggggtccacagaggatgagggttgtggcagggccgtccatcagcgctgaccttccgggggcccagagcttcccagccctgagtcaagctggccatgaacgcgtacacttcagttcagcaggatgggctggagagcctctctgtgcagcggtgtggggtgagccctgctgtggcctccttgtggtggtccctcttcccacgtgcagccctgttgggaagaaaggaagaaaacaggtccctccaggggtgctgctgcctaagccacccacataagtacgctggtgccgtgtcacccatgttgagccgctcctgatggctgacgggctcccagaccctcacctcggacatggtggtgggggaaggacgggtgggcaaggctggtgcgttccccagctctccctacgctgctcgggccattgcccagccagatgtggtcacctcagtccagctctggggcctccaggccatgtggctgttcccacggcccagtcctcgctgcagtaacccctgggggctctgaccacctatgggggccgggcaggagcctctggggcctccactccgacatcaggacctgagatgaccgctgtgtggcgctctctccctgggcagggtggatgccacaggcccctctggctcccaggtgctgcttctccacaggtgcggcctggcccggcctcctaaaggccacaccctccccacgcacttcccaggccagaatccaaacatcgggaaccctgttttcttctgggtgtgtctcacttagaaatcgtggttcttccccgagggtgcatgttgcaggagggagagggcagggaagactcacagcagagcaggagggggcctgtgcttctcggggtctgcaccccaggcacagcggtgtcaccccgcaggaccgcgggcctgccccaacccccagcattcccgggtgggcccagaccccatcaccaagactggccacccgctgcgtgtgtgtgcgcgcgcgtgtacgtgtggccccacatccgccgccttccacgctaggatgtaagaggtcgcctcctattgtacatttggggaaagccttgggtgtaaatcagtgtaaacttggaggagagatttttctatcatgtagagtaggtattttttatagattgaaggttgatcaattttttaatactttcaagagaaaactgtgtatacacatgaaatatatatatatatatatatatatatatgtataatatataaagactggcaccctgcctctctgtgcccaggcccagccctggtgacatggcaccactcagcagtgctgtcactgtaagcatggactcccaggagacagtgtgggaaacgctcctgctttaattccccgagaaacggctcttcctgcctggatgcaggagggcaggggccaccacagattaaagctgttactgcacaaaaaaaaaaaaaaaaaaaaaa

SEQ ID NO: 45 - DNA, 6597 bp, Homo sapiens
tttcccggcgtgccccaggagagcggcgtggacgcgtgcgggcctagaggcccacgtgatccgcagggcggccgaggcaggaagctgtgagtgcgcggttgcggggtcgcattgtggctacggctttgcgtccccggcgggcagccccaggctggtccccgcctccgctctccccaccggcggggaaagcagctggtgtgggaggaaaggctccatcccccgccccctctctcccgctgttggctggcaggatcttttggcagtcctgtggcctcgctccccgcccggatcctcctgaccctgagattcgcgggtctcacgtcccgtgcacgccttgcttcggcctcagttaagcctttgtggactccaggtccctggtgagattagaaacgtttgcaaacatgtcccggatcgaaaagatgagcattctgggcgtgcggagttttggaatagaggacaaagataagcaaattatcactttcttcagcccccttacaattttggttggacccaatggggcgggaaagacgaccatcattgaatgtctaaaatatatttgtactggagatttccctcctggaaccaaaggaaatacatttgtacacgatcccaaggttgctcaagaaacagatgtgagagcccagattcgtctgcaatttcgtgatgtcaatggagaacttatagctgtgcaaagatctatggtgtgtactcagaaaagcaaaaagacagaatttaaaactctggaaggagtcattactagaacaaagcatggtgaaaaggtcagtctgagctctaagtgtgcagaaattgaccgagaaatgatcagttctcttggggtttccaaggctgtgctaaataatgtcattttctgtcatcaagaagattctaattggcctttaagtgaaggaaaggctttgaagcaaaagtttgatgagattttttcagcaacaagatacattaaagccttagaaacacttcggcaggtacgtcagacacaaggtcagaaagtaaaagaatatcaaatggaactaaaatatctgaagcaatataaggaaaaagcttgtgagattcgtgatcagattacaagtaaggaagcccagttaacatcttcaaaggaaattgtcaaatcctatgagaatgaacttgatccattgaagaatcgtctaaaagaaattgaacataatctctctaaaataatgaaacttgacaatgaaattaaagccttggatagccgaaagaagcaaatggagaaagataatagtgaactggaagagaaaatggaaaaggtttttcaagggactgatgagcaactaaatgacttatatcacaatcaccagagaacagtaagggagaaagaaaggaaattggtagactgtcatcgtgaactggaaaaactaaataaagaatctaggcttctcaatcaggaaaaatcagaactgcttgttgaacagggtcgtctacagctgcaagcagatcgccatcaagaacatatccgagctagagattcattaattcagtctttggcaacacagctagaattggatggctttgagcgtggaccattcagtgaaagacagattaaaaattttcacaaacttgtgagagagagacaagaaggggaagcaaaaactgccaaccaactgatgaatgactttgcagaaaaagagactctgaaacaaaaacagatagatgagataagagataagaaaactggactgggaagaataattgagttaaaatcagaaatcctaagtaagaagcagaatgagctgaaaaatgtgaagtatgaattacagcagttggaaggatcttcagacaggattcttgaactggaccaggagctcataaaagctgaacgtgagttaagcaaggctgagaaaaacagcaatgtagaaaccttaaaaatggaagtaataagtctccaaaatgaaaaagcagacttagacaggaccctgcgtaaacttgaccaggagatggagcagttaaaccatcatacaacaacacgtacccaaatggagatgctgaccaaagacaaagctgacaaagatgaacaaatcagaaaaataaaatctaggcacagtgatgaattaacctcactgttgggatattttcccaacaaaaaacagcttgaagactggctacatagtaaatcaaaagaaattaatcagaccagggacagacttgccaaattgaacaaggaactagcttcatctgagcagaataaaaatcatataaataatgaactaaaaagaaaggaagagcagttgtccagttacgaagacaagctgtttgatgtttgtggtagccaggattttgaaagtgatttagacaggcttaaagaggaaattgaaaaatcatcaaaacagcgagccatgctggctggagccacagcagtttactcccagttcattactcagctaacagacgaaaaccagtcatgttgccccgtttgtcagagagtttttcagacagaggctgagttacaagaagtcatcagtgatttgcagtctaaactgcgacttgctccagataaactcaagtcaacagaatcagagctaaaaaaaaaggaaaagcggcgtgatgaaatgctgggacttgtgcccatgaggcaaagcataattgatttgaaggagaaggaaataccagaattaagaaacaaactgcagaatgtcaatagagacatacagcgcctaaagaacgacatagaagaacaagaaacactcttgggtacaataatgcctgaagaagaaagtgccaaagtatgcctgacagatgttacaattatggagaggttccagatggaacttaaagatgttgaaagaaaaattgcacaacaagcagctaagctacaaggaatagacttagatcgaactgtccaacaagtcaaccaggagaaacaagagaaacagcacaagttagacacagtttctagtaagattgaattgaatcgtaagcttatacaggaccagcaggaacagattcaacatctaaaaagtacaacaaatgagctaaaatctgagaaacttcagatatccactaatttgcaacgtcgtcagcaactggaggagcagactgtggaattatccactgaagttcagtctttgtacagagagataaaggatgctaaagagcaggtaagccctttggaaacaacattggaaaagttccagcaagaaaaagaagaattaatcaacaaaaaaaatacaagcaacaaaatagcacaggataaactgaatgatattaaagagaaggttaaaaatattcatggctatatgaaagacattgagaattatattcaagatgggaaagacgactataagaagcaaaaagaaactgaacttaataaagtaatagctcaactaagtgaatgcgagaaacacaaagaaaagataaatgaagatatgagactcatgagacaagatattgatacacagaagatacaagaaaggtggctacaagataaccttactttaagaaaaagaaatgaggaactaaaagaagttgaagaagaaagaaaacaacatttgaaggaaatgggtcaaatgcaggttttgcaaatgaaaagtgaacatcagaagttggaagagaacatagacaatataaaaagaaatcataatttggcattagggcgacagaaaggttatgaagaagaaattattcattttaagaaagaacttcgagaaccacaatttcgggatgctgaggaaaagtatagagaaatgatgattgttatgaggacaacagaacttgtgaacaaggatctggatatttattataagactcttgaccaagcaataatgaaatttcacagtatgaaaatggaagaaatcaataaaattatacgtgacctgtggcgaagtacctatcgtggacaagatattgaatacatagaaatacggtctgatgccgatgaaaatgtatcagcttctgataaaaggcggaattataactaccgagtggtgatgctgaagggagacacagccttggatatgcgaggacgatgcagtgctggacaaaaggtattagcctcactcatcattcgcctggccctggctgaaacgttctgcctcaactgtggcatcattgccttggatgagccaacaacaaatcttgaccgagaaaacattgaatctcttgcacatgctctggttgagataataaaaagtcgctcacagcagcgtaacttccagcttctggtaatcactcatgatgaagattttgtggagcttttaggacgttctgaatatgtggagaaattctacaggattaaaaagaacatcgatcagtgctcagagattgtgaaatgcagtgttagctccctgggattcaatgttcattaaaaatatccaagatttaaatgccatagaaatgtaggtcctcagaaagtgtataataagaaacttatttctcatatcaacttagtcaataagaaaatatattctttcaaaggaacattgtgtctaggattttggatgttgagaggttctaaaatcatgaaacttgtttcactgaaaattggacagattgcctgtttctgatttgctgctcttcatcccattccaggcagcctctgtcaggccttcagggttcagcagtacagccgagactcgactctgtgcctccctccccagtgcaaatgcatgcttcttctcaaagcactgttgagaaggagataattactgccttgaaaatttatggttttggtatttttttaaatcatagttaaatgttacctctgaatttacttccttgcatgtggtttgaaaaactgagtattaatatctgaggatgaccagaaatggtgagatgtatgtttggctctgcttttaactttataaatccagtgacctctctctctgggacttggtttccccaactaaaatttgaagtagttgaatggggtctcaaagtttgacaggaaccttaagtaatcatctaagtcagtacccaccaccttcttctcctacatatcccttccagatggtcatccagactcagagctctctctacagagaggaaattctccactgtgcacacccacctttggaaagctctgaccacttgaggcctgatctgcccatcgtgaagaagcctgtaacactcctctgcgtctatcctgtgtagcatactggcttcaccatcaatcctgattcctctctaagtgggcattgccatgtggaaggcaagccaggctcactcacagagtcaaggcctgctccctgtagggtccaaccagacctggaagaacaggcctctccatttgctcttcagatgccacttctaagaaaagcctaatcacagtttttcctggaattgccagctgacatcttgaatccttccattccacacagaatgcaaccaagtcacacgcttttgaattatgctttgtagagttttgtcattcagagtcagccaggaccataccgggtcttgattcagtcacatggcatggttttgtgccatctgtagctataatgagcatgtttgcctagacagcttttctcaactgggtccagaagagaattaagccctaaggtcctaaggcatctatctgtgctaggttaaatggttggcccccaaagatagacaggtcctgatttctagaacccgtgactgttactttatacagcaaaggaaactttgcagatgtgattaaagctaaggaccttaagacagagtatcctgggggtggtggtggggtgggggggggtcctaaatgtaatcacgagtaagattaagagcaaatcaattctagtcatatattaaacatccacaataaccaagatatttttatcccaagaatgcaagatttcagaaaatgaaaaatctgttgataaatccatcactataataaaaccgaaggtgaaaaaaattctgaaaaaattctagcagctatatttgataaaattcaacatctcctagctttagcaaactcacagttttgcaaataatattttcttaatgttatctgttgctaaatcaaaattaaacagtcatcttaactgcaaaataaaacatttctcagtaaatattaaagccagttaccttctatcaacatgttaatgaaagtgctagttgttgcagcaaagaataacaaaggcaatacacgatcaatataggcagtgaaacaaaagtatcatttgcaagttaaaacagacttcccaattttaaatctggtttccccctgaatatgtggcatccttggcagcacttctgagagtggctgctttcattccaagaagcccatgggtttggaggtgggataggtgcctttctggcttctcattgctgcttctagatcagtctccaaatatcccccttccccacattggaatgaatagccatcacagcatggatggaggttagaatgagccagactgcctgggctcaaatcctagcacaccactcactagctggggaccttgagcaagttatttgtcctgttttctgtttccttatatgtaaaagtgggtaaaatggtacatattttgtagggttgttatgaagattgaatgacattatttacaaactgcttagaactgcttgccacctactaaatactgtgtaagtgttcaagaaaaagctgtcttcatttca

SEQ ID NO: 46 - DNA, 2358 bp, Homo sapiens
gcagaagggaagcaactccgggcgcctttcttttgcgcaggcgtcgcgccctggggccggggccgggcggcaccgcggtgcgcaagcgcaaccgtcggtgggtcggggatcggtcgcctgagaggtatcacctcttctgggctcaagatggacaacaagaagcgcctggcctacgccatcatccagttcctgcatgaccagctccggcacgggggcctctcgtccgatgctcaggagagcttggaagtcgccatccagtgcctggagactgcgtttggggtgacggtagaagacagtgaccttgcgctccctcagactctgccggagatatttgaagcggctgccacgggcaaggagatgccgcaggacctgaggagccccgcgcgaaccccgccttccgaggaggactcagcagaggcagagcgcctcaaaaccgaaggaaacgagcagatgaaagtggaaaactttgaagctgccgtgcatttctacggaaaagccatcgagctcaacccagccaacgccgtctatttctgcaacagagccgcagcctacagcaaactcggcaactacgcaggcgcggtgcaggactgtgagcgggccatctgcattgacccggcctacagcaaggcctacggcaggatgggcctggcgctctccagcctcaacaagcacgtggaggccgtggcttactacaagaaggctctggagctggaccccgacaacgagacatacaagtccaacctcaagatagcggagctgaagctgcgggaggcccccagccccacgggaggcgtgggcagcttcgacatcgccggcctgctgaacaaccctggcttcatgagcatggcttcgaacctaatgaacaatccccagattcagcagctcatgtccggcatgatttcgggtggcaacaaccccttgggaactcccggcaccagcccctcgcagaacgacctggccagcctcatccaggcgggccagcagtttgcccagcagatgcagcagcagaacccagagttgatagagcagctcaggagccagatccggagtcggacgcccagcgccagcaacgacgaccagcaggagtgacgctgcctgctcccggtgtgaccgcgtccttccctggccgacccgaaggaagccttctggttgtctgccacttcctcctgttggactgcctgagagaggggaagagagagacctcggacctgcatgtcaagatggattttccccttttatctctgccctcctccactccctttttgtaactcccttacagcccccagacccttcttgaaacgagagccagcaagctgagcacagaccagcagcgacctcccttccagcccccagaaagctcggtcacttgagtgttttctagaatcctggggtgctcccgggccgctctcagagaagtggcaggtttcacgttcagccgtgtggcggatcgtgtggcttccaaagccttttacagcccccgccccccatcccgtggtctgtctgcaggaactctcccgtctgtgagaagcctctttccgagtcgacctcccggccaccccggccctgtgcctgctcggaagagctcactgccagctgcggcctgggcaccgcgggccatgtgtgtttgcatgaggaactctttagtggcagacacctaagagacggctgcggtcaccccacgcctccgcggctcaggagccgtcctgggtgcataggaccagtttctgtgacttttctccagttgggcatgttgacagacatgtttcccctcctcccaccctcattttctggtcctcgcgactgagagccaggggcgacatcatgaccttctgtcccggccgccttagccccgggcacagggaaggcagctgggccgtttctgtctgtgtcccatcctgctgtccttctgtcctggatgtttcatgggcccggggccccccagggaagcttacccctcctgtgctgggtggaggccacgggacacctcaggtgccacccaccttggccctaaaacagccaccaggaaagcagccggagagccggacagcaggcagcctgtctgggttcctgaggcctgggggtggcagacgagcccacggcgccgtggtcccagcagcagggttgtcagtcggagcatcctggggctccctggctcctggccgtctgtgaggtaggcgcagtaccgtgtatcgtaggtagcagtaggaacgggggccgccgcggccctgcagccgctcatggcggtgaggtgtgtgccaagcccacccggggtgcagggcgtgacgtgtggggaataaataggcgttgtgacctctaaaaaaaaaaaaaaaaaaaaaaaaaaaaaaaaaaaaaaaaaaa

SEQ ID NO: 47 - DNA, 2388 bp, Homo sapiens
gcggccgccgccccaccgtaggtccgtagcaggtggtcgaagtcgggcctccccgcgggcgtcacccagcgccgccggctgccccagccctgcgtgaaggcgctggaaaacacgcagggcaggttgggcagcaagaagccccgcacaaagtcggcgtaggagaaggcgcccggctccgagacgaaggctacccggcccggagcctggccgacgccggggacatcgacccccaggcctcggaagtggctgtcggcgagggcgcgcgtctcgcggtccatccagctcagcacgggtcgaaggaccctcctcctcacttccgccggagcggaaacggtgaggaccagcctcggaaccagaagacgcagggcgccgcgtttctgccccgccagcgcctggggctccgggcctgcacgcatgcgcgcggctcgccgcggtcttcactgcgcaggcgccgagcggccgaggcgccgcggtcggctctgggactcgtctggcgtccctcagaggcagaagaggcctggaccttggcgcacacagacccaggaacagatgagcagggatgtctgcatccacacctggccgtgcacctactacctggagcccaagaggcgatgggttactggacagctgtccttaacatcgctgtcgctcaggttcatgactgacagcactggagagattctggtcagcttccccctctccagcatagttgagatcaagaaggaggcttcacattttatcttcagctccatcaccatcctggagaagggccatgccaagcactggttcagctccctgcggccaagtcgaaatgtggtcttcagcatcatcgagcatttctggagggagctgctgctgtctcagcctggagccgtggcagacgcatctgtcccaaggacccggggcgaggagctgacgggactcatggctggatcccagaaacgcctggaggacacggcgagggtcctgcaccaccagggccagcagctggacagcgtcatgagaggcctggacaagatggagtcagacctggaggtggcggacagattgctgacagaactggaatctcctgcttggtggccctttagctccaagctttggaagacaccaccggaaacaaagcccagggaagatgtctccatgaccagttgtgaaccctttgggaaagaagggatactgataaaaattcctgctgttatttcccacagaacagagtctcacgttaaaccagggaggctcaccgtccttgtgtctgggttggaaatacatgactccagttctttgctcatgcacaggtttgaaagagaagacgtggacgacatcaaggtccactcaccttacgaaattagcatccgccagcggtttattggaaagccagacatggcctatcgtttgatatctgccaagatgccagaggttatccccattttagaagtgcagttcagcaagaagatggagctgttagaagatgcattggtgctcagaagcgcaagaacctcttcccccgcagagaagagctgctcagtctggcatgcagcatctgggctgatgggccgtaccctgcaccgtgagccacccgcaggagaccaggagggcacagcactgcacctgcagacaagcctgccagccctttctgaggcagatacccaggaactaacccagatcctgaggaggatgaaggggctggccctggaggccgagagtgagctggagagacaagacgaagccctggatggcgttgcagcagctgtggacagggcaaccttgaccatcgacaagcacaacaggcggatgaagaggctgacctaggggcagaacgtccctgcattcctgtctcaccctgcacatcccgctgagatggagggctgggcggcagtgccagggctgcagaggcctgtggccctccggagtggtcttcctctggatggggctgctactgtggggctgcttctgcaccaggggcctccccaggtgtgcaccatgcctgcctcccacttggctgtccctgctgctgggcaggacccggccacatgttctgcggatgctgcagaagtgtggaccatggcgggaccccaaggacacttggcacaggcctggaagaggccgccctcgtcttgtctcggctccctttcatggacagactggccttcttagctgtactataaatttgtgagtgaagttagagcccagctcacttagccagctcactttgagggcatcctataaacacccaactgttcttttatcgtctcggttttagccaaaagtgaaattagcatgactgcatctttcaaacaaaaatattgatttctgcttttagggccccgtttccatccagaaataaagggaaatgctggcttcagagtgaaaaaaaaaaaaaaaaaaaaa

SEQ ID NO: 48 - DNA, 10650 bp, Homo sapiens
atgcagaaagcccggggcacgcgaggcgaggatgcgggcacgagggcaccccccagccccggagtgcccccgaaaagggccaaggtgggggccggcggcggggctcctgtggccgtggccggggcgccagtcttcctgcggcccctgaagaacgcggcggtgtgcgcgggcagcgacgtgcggctgcgggtggtggtgagcgggacgccccagcccagcctccgctggttccgggatgggcagctcctgcccgcgccggcccccgagcccagctgcctgtggctgcggcgctgcggggcgcaggacgccggcgtgtacagctgcatggcccagaacgagcggggccgggcctcctgcgaggcggtgctcacagtgctggaggtcggagactcagagacggctgaggatgacatcagcgatgtgcagggaacccagcgcctggagcttcgggatgacggggccttcagcacccccacggggggttctgacaccctggtgggcacctccctggacacacccccgacctccgtgacaggcacctcagaggagcaagtgagctggtggggcagcgggcagacggtcctggagcaggaagcgggcagtgggggtggcacccgccgcctcccgggcagcccaaggcaagcacaggcaaccggggccgggccacggcacctgggggtggagccgctggtgcgggcatctcgagctaatctggtgggcgcaagctgggggtcagaggatagcctttccgtggccagtgacctgtacggcagcgcattcagcctgtacagaggacgggcgctctctatccacgtcagcgtccctcagagcgggttgcgcagggaggagcccgaccttcagcctcaactggccagcgaagccccacgccgccctgcccagccgcctccttccaaatccgcgctgctccccccaccgtcccctcgggtcgggaagcggtccccgccgggacccccggcccagcccgcggccacccccacgtcgccccaccgtcgcactcaggagcctgtgctgcccgaggacaccaccaccgaagagaagcgagggaagaagtccaagtcgtccgggccctccctggcgggcaccgcggaatcccgaccccagacgccactgagcgaggcctcaggccgcctgtcggcgttgggccgatcgcctaggctggtgcgcgccggctcccgcatcctggacaagctgcagttcttcgaggagcgacggcgcagcctggagcgcagcgactcgccgccggcgcccctgcggccctgggtgcccctgcgcaaggcccgctctctggagcagcccaagtcggagcgcggcgcaccgtggggcacccccggggcctcgcaggaagaactgcgggcgccaggcagcgtggccgagcggcgccgcctgttccagcagaaagcggcctcgctggacgagcgcacgcgtcagcgcagcccggcctcagacctcgagctgcgcttcgcccaggagctgggccgcatccgccgctccacgtcgcgggaggagctggtgcgctcgcacgagtccctgcgcgccacgctgcagcgtgccccatcccctcgagagcccggcgagcccccgctcttctctcggccctccacccccaagacatcgcgggccgtgagccccgccgccgcccagccgccctctccgagcagcgcggagaagccgggggacgagcctgggaggcccaggagccgcgggccggcgggcaggacagagccgggggaaggcccgcagcaggaggttaggcgtcgggaccaattcccgctgacccggagcagagccatccaggagtgcaggagccctgtgccgccccccgccgccgatcccccagaggccaggacgaaagcaccccccggtcggaagcgggagcccccggcgcaggccgtgcgcttcctgccctgggccacgccgggcctggagggcgctgctgtaccccagaccttggagaagaacagggcggggcctgaggcagagaagaggcttcgcagagggccggaggaggacggtccctgggggccctgggaccgccgaggggcccgcagccagggcaaaggtcgccgggcccggcccacctcccctgagctcgagtcttcggatgactcctacgtgtccgctggagaagagcccctagaggcccctgtgtttgagatccccctgcagaatgtggtggtggcaccaggggcagatgtgctgctcaagtgtatcatcactgccaaccccccgccccaagtgtcctggcacaaggatgggtcagcgctgcgcagcgagggccgcctcctcctccgggctgagggtgagcggcacaccctgctgctcagggaggccagggcagcagatgccgggagctatatggccaccgccaccaacgagctgggccaggccacctgtgccgcctcactgaccgtgagacccggtgggtctacatcccctttcagcagccccatcacctccgacgaggaatacctgagccccccagaggagttcccagagcctggggagacctggccgcgaacccccaccatgaagcccagtcccagccagaaccgccgttcttctgacactggctccaaggcaccccccaccttcaaggtctcacttatggaccagtcagtaagagaaggccaagatgtcatcatgagcatccgcgtgcagggggagcccaagcctgtggtctcctggctgagaaaccgccagcccgtgcgcccagaccagcggcgctttgcggaggaggctgagggtgggctgtgccggctgcggatcctggctgcagagcgtggcgatgctggtttctacacttgcaaagcggtcaatgagtatggtgctcggcagtgcgaggcccgcttggaggtccgagcacaccctgaaagccggtccctggccgtgctggcccccctgcaggacgtggacgtgggggccggggagatggcgctgtttgagtgcctggtggcggggcccactgacgtggaggtggattggctgtgccgtggccgcctgctgcagcctgcactgctcaaatgcaagatgcatttcgatggccgcaaatgcaagctgctacttacatctgtacatgaggacgacagtggcgtctacacctgcaagctcagcacggccaaagatgagctgacctgcagtgcccggctgaccgtgcggccctcgttggcacccctgttcacacggctgctggaagatgtggaggtgttggagggccgagctgcccgtttcgactgcaagatcagtggcaccccgccccctgttgttacctggactcattttggctgccccatggaggagagtgagaacttgcggctgcggcaggacgggggtctgcactcactgcacattgcccatgtgggcagcgaggacgaggggctctatgcggtcagtgctgttaacacccatggccaggcccactgctcagcccagctgtatgtagaagagccccggacagccgcctcaggccccagctcgaagctggagaagatgccatccattcccgaggagccagagcagggtgagctggagcggctgtccattcctgacttcctgcggccactgcaggacctggaggtgggactggccaaggaggccatgctagagtgccaggtgaccggcctgccctaccccaccatcagctggttccacaatggccaccgcatccagagcagcgacgaccggcgcatgacacagtacagggatgtccatcgcttggtgttccctgccgtggggcctcagcacgccggtgtctacaagagcgtcattgccaacaagctgggcaaagctgcctgctatgcccacctgtatgtcacagatgtggtcccaggccctccagatggcgccccgcaggtggtggctgtgacggggaggatggtcacactcacatggaacccccccaggagtctggacatggccatcgacccggactccctgacgtacacagtgcagcaccaggtgctgggctcggaccagtggacggcactggtcacaggcctgcgggagccagggtgggcagccacagggctgcgtaagggggtccagcacatcttccgggtcctcagcaccactgtcaagagcagcagcaagccctcacccccttctgagcctgtgcagctgctggagcacggcccaaccctggaggaggcccctgccatgctggacaaaccagacatcgtgtatgtggtggagggacagcctgccagcgtcaccgtcacattcaaccatgtggaggcccaggtcgtctggaggagctgccgaggggccctcctagaggcacgggccggtgtgtacgagctgagccagccagatgatgaccagtactgtcttcggatctgccgggtgagccgccgggacatgggggccctcacctgcaccgcccgaaaccgtcacggcacacagacctgctcggtcacattggagctggcagaggcccctcggtttgagtccatcatggaggacgtggaggtgggggctggggaaactgctcgctttgcggtggtggtcgagggaaaaccactgccggacatcatgtggtacaaggacgaggtgctgctgaccgagagcagccatgtgagcttcgtgtacgaggagaatgagtgctccctggtggtgctcagcacgggggcccaggatggaggcgtctacacctgcaccgcccagaacctggcgggtgaggtctcctgcaaagcagagttggctgtgcattcagctcagacagctatggaggtcgagggggtcggggaggatgaggaccatcgaggaaggagactcagcgacttttatgacatccaccaggagatcggcaggggtgctttctcctacttgcggcgcatagtggagcgtagctccggcctggagtttgcggccaagttcatccccagccaggccaagccaaaggcatcagcgcgtcgggaggcccggctgctggccaggctccagcacgactgtgtcctctacttccatgaggccttcgagaggcgccggggactggtcattgtcaccgagctctgcacagaggagctgctggagcgaatcgccaggaaacccaccgtgtgtgagtctgagatccgggcctatatgcggcaggtgctagagggaatacactacctgcaccagagccacgtgctgcacctcgatgtcaagcctgagaacctgctggtgtgggatggtgctgcgggcgagcagcaggtgcggatctgtgactttgggaatgcccaggagctgactccaggagagccccagtactgccagtatggcacacctgagtttgtagcacccgagattgtcaatcagagccccgtgtctggagtcactgacatctggcctgtgggtgttgttgccttcctctgtctgacaggaatctccccgtttgttggggaaaatgaccggacaacattgatgaacatccgaaactacaacgtggccttcgaggagaccacattcctgagcctgagcagggaggcccggggcttcctcatcaaagtgttggtgcaggaccggctgagacctaccgcagaagagaccctagaacatccttggttcaaaactcaggcaaagggcgcagaggtgagcacggatcacctgaagctattcctctcccggcggaggtggcagcgctcccagatcagctacaaatgccacctggtgctgcgccccatccccgagctgctgcgggcccccccagagcgggtgtgggtgaccatgcccagaaggccaccccccagtggggggctctcatcctcctcggattctgaagaggaagagctggaagagctgccctcagtgccccgcccactgcagcccgagttctctggctcccgggtgtccctcacagacattcccactgaggatgaggccctggggaccccagagactggggctgccacccccatggactggcaggagcagggaagggctccctctcaggaccaggaggctcccagcccagaggccctcccctccccaggccaggagcccgcagctggggctagccccaggcggggagagctccgcaggggcagctcggctgagagcgccctgccccgggccgggccgcgggagctgggccggggcctgcacaaggcggcgtctgtggagctgccgcagcgccggagccccagcccgggagccacccgcctggcccggggaggcctgggtgagggcgagtatgcccagaggctgcaggccctgcgccagcggctgctgcggggaggccccgaggatggcaaggtcagcggcctcaggggtcccctgctggagagcctggggggccgtgctcgggacccccggatggcacgagctgcctccagcgaggcagcgccccaccaccagcccccactcgagaaccggggcctgcaaaagagcagcagcttctcccagggtgaggcggagccccggggccggcaccgccgagcgggggcgcccctcgagatccccgtggccaggcttggggcccgtaggctacaggagtctccttccctgtctgccctcagcgaggcccagccatccagccctgcacggcccagcgcccccaaacccagtacccctaagtctgcagaaccttctgccaccacacctagtgatgctccgcagccccccgcaccccagcctgcccaagacaaggctccagagcccaggccagaaccagtccgagcctccaagcctgcaccacccccccaggccctgcaaaccctagcgctgcccctcacaccctatgctcagatcattcagtccctccagctgtcaggccacgcccagggcccctcgcagggccctgccgcgccgccttcagagcccaagccccacgctgctgtctttgccagggtggcctccccacctccgggagcccccgagaagcgcgtgccctcagccgggggtcccccggtgctagccgagaaagcccgagttcccacggtgccccccaggccaggcagcagtctcagtagcagcatcgaaaacttggagtcggaggccgtgttcgaggccaagttcaagcgcagccgcgagtcgcccctgtcgctggggctgcggctgctgagccgttcgcgctcggaggagcgcggccccttccgtggggccgaggaggaggatggcatataccggcccagcccggcggggaccccgctggagctggtgcgacggcctgagcgctcacgctcggtgcaggacctcagggctgtcggagagcctggcctcgtccgccgcctctcgctgtcactgtcccagcggctgcggcggacccctcccgcgcagcgccacccggcctgggaggcccgcggcggggacggagagagctcggagggcgggagctcggcgcggggctccccggtgctggcgatgcgcaggcggctgagcttcaccctggagcggctgtccagccgattgcagcgcagtggcagcagcgaggactcggggggcgcgtcgggccgcagcacgccgctgttcggacggcttcgcagggccacgtccgagggcgagagtctgcggcgccttggccttccgcacaaccagttggccgcccaggccggcgccaccacgccttccgccgagtccctgggctccgaggccagcgccacgtcgggctcctcagccccaggggaaagccgaagccggctccgctggggcttctctcggccgcggaaggacaaggggttatcgccaccaaacctctctgccagcgtccaggaggagttgggtcaccagtacgtgcgcagtgagtcagacttccccccagtcttccacatcaaactcaaggaccaggtgctgctggagggggaggcagccaccctgctctgcctgccagcggcctgccctgcaccgcacatctcctggatgaaagacaagaagtccttgaggtcagagccctcagtgatcatcgtgtcctgcaaagatgggcggcagctgctcagcatcccccgggcgggcaagcggcacgccggtctctatgagtgctcggccaccaacgtactgggcagcatcaccagctcctgtaccgtggctgtggcccgagtcccaggaaagctagctcctccagaggtaccccagacctaccaggacacggcgctggtgctgtggaagccgggagacagccgggcaccttgcacgtatacgctggagcggcgagtggatggggagtctgtgtggcaccctgtgagctcaggcatccccgactgttactacaacgtgacccacctgccagttggcgtgactgtgaggttccgtgtggcctgtgccaaccgtgctgggcaggggcccttcagcaactcttctgagaaggtctttgtcaggggtactcaagattcttcagctgtgccatctgctgcccaccaagaggcccctgtcacctcaaggccagccagggcccggcctcctgactctcctacctcactggccccacccctagctcctgctgcccccacacccccgtcagtcactgtcagcccctcatctccccccacacctcctagccaggccttgtcctcgctcaaggctgtgggtccaccaccccaaacccctccacgaagacacaggggcctgcaggctgcccggccagcggagcccaccctacccagtacccacgtcaccccaagtgagcccaagcctttcgtccttgacactgggaccccgatcccagcctccactcctcaaggggttaaaccagtgtcttcctctactcctgtgtatgtggtgacttcctttgtgtctgcaccaccagcccctgagcccccagcccctgagccccctcctgagcctaccaaggtgactgtgcagagcctcagcccggccaaggaggtggtcagctcccctgggagcagtccccgaagctctcccaggcctgagggtaccactcttcgacagggtccccctcagaaaccctacaccttcctggaggagaaagccaggggccgctttggtgttgtgcgagcgtgccgggagaatgccacggggcgaacgttcgtggccaagatcgtgccctatgctgccgagggcaagcggcgggtcctgcaggagtacgaggtgctgcggaccctgcaccacgagcggatcatgtccctgcacgaggcctacatcacccctcggtacctcgtgctcattgctgagagctgtggcaaccgggaactcctctgtgggctcagtgacaggttccggtattctgaggatgacgtggccacttacatggtgcagctgctacaaggcctggactacctccacggccaccacgtgctccacctagacatcaagccagacaacctgctgctggcccctgacaatgccctcaagattgtggactttggcagtgcccagccctacaacccccaggcccttaggccccttggccaccgcacgggcacgctggagttcatggctccggagatggtgaagggagaacccatcggctctgccacggacatctggggagcgggtgtgctcacttacattatgctcagtggacgctccccgttctatgagccagacccccaggaaacggaggctcggattgtggggggccgctttgatgccttccagctgtaccccaatacatcccagagcgccaccctcttcttgcgaaaggttctctctgtacatccctggagccggccctccctgcaggactgcctggcccacccatggttgcaggacgcctacctgatgaagctgcgccgccagacgctcaccttcaccaccaaccggctcaaggagttcctgggcgagcagcggcggcgccgggctgaggctgccacccgccacaaggtgctgctgcgctcctaccctggcggcccctagaggcacggaccacagccaggcctcgggcttcaactggggttcccaccaatgccacgggacattccagggcccacgctgagccaggcgggcctggggcttcggttaccaccagcagcaacatctggctgggctcttacctcatagaccttcaaggacagagaccccagggcctggacctgatgccaccccaggccaaagccagagtgggagacccattggtcaggctcagcagggtgggaacaggcagagggacaagaggggaatggagaagtggagaggaaaaggaatcgagggacaggaagggggaggctctaggaaggttctgggttgggggtcagtgcatctcagggagaaccaaggaaggtgggcatggctggagaggaggaaaaggaaggagccccaggtgtcagggcagtaggctgggagtcagtgtggcaaagcgggggcaggacacagatacagtggcaggggcccagggctgggacatgagagaaggcagcgaggcggcagagggagaagagaggactcaggtggaggtggggtgggtcagctgtcagcatccctcagaggagaaatgtggagagctggaggccagcagtcactcacactcgctctgtcctcctgtccagtggatacagccctgggcgctctgctggcccaaggatgtccccactgcccctccatggcctctggccttcttcccattcatatttatttatttattgacttttatgaagtttccccttccatccgatccctactgcccatgttgtcctgaccatccctcccagccatccagctgtctgtctgtctgccacaaggaaataaaaatggcaagcagcataa

SEQ ID NO: 49 - DNA, 1877 bp, Homo sapiens
ccgcgacggcgcgcccccggcggctgctgcggcggcgggagcgaggcgaccgctgaggccgcggagagtgacggcggcccggccgacgggagccggggcggggcggcggcccagcgaaggagcgcgcgggcggtctggccccgccccctccccgcccgccttcccggtgaccttcaggggcccgggtggcgggcgcaggcccctgcggcggcggcgggatgttcgtgcaggaggagaagatcttcgcgggcaaggtgctgcggctgcacatctgcgcgtccgacggcgccgagtggctggaggaggccaccgaggacacctcggtggagaagctcaaggagcgctgcctcaagcactgtgctcatgggagcttagaagatcccaaaagtataacccatcataaattaatccacgctgcctcagagagggtgctgagtgatgccaggaccatcctggaagagaacatccaggaccaagatgtcctattattgataaaaaagcgtgctccatcaccacttcccaagatggctgatgtctcagcagaagaaaagaaaaaacaagaccagaaagctccagataaagaggccatactgcgggccaccgccaacctgccctcctacaacatggaccgggccgcggtccagaccaacatgagagacttccagacagaactccggaagatactggtgtctctcatcgaggtggcgcagaagctgttagcgctgaacccagatgcggtggaattgtttaagaaggcgaatgcaatgctggacgaggacgaggatgagcgtgtggacgaggctgccctgcggcagctcacggagatgggctttccggagaacagagccaccaaggcccttcagctgaaccacatgtcggtgcctcaggccatggagtggctaattgaacacgcagaagacccgaccatagacacgcctcttcctggccaagctcccccagaggccgagggggccacagcagctgcctccgaggctgccgcgggagccagcgccaccgatgaggaggccagagatgagctgacggaaatcttcaagaagatccggaggaaaagggagtttcgggctgatgctcgggccgtcatttccctgatggagatggggttcgacgagaaagaggtgatagatgccctcagagtgaacaacaaccagcagaatgccgcgtgcgagtggctgctgggggaccggaagccctctccggaggagctggacaagggcatcgaccccgacagtcctctctttcaggccatcctggataacccggtggtgcagctgggcctgaccaacccgaaaacattgctagcatttgaagacatgctggagaacccactgaacagcacccagtggatgaatgatccagaaacggggcctgtcatgctgcagatctctagaatcttccagacactaaatcgcacgtaggtggcgttgttccactcggctatcaggccacagcagccccctggtgcggcccgagaccgggcagagtggacctcacctggaaactcaccttcagcgcctcagccctggactgttagaggtgctgcagctgctcctgctctctgatcttattgcttataaactttggtgacggtagtgtgtaaggccgtatttttagcatctgacaggtgtttacaaaaaagtggttgtcgcactgggaagtggagtgatggcctcgtctccagtgctcctctgggctcttgagttgctgcttgaattgccgtgtagacatttgcttggagagtccacttgttatttgacggaggtaggtttcaacccagagttaatgtcaagcatgctaatttaactagtcactcacagatgacttttctttaataaagtcccttttcctaaaaaaaaaaa

SEQ ID NO: 50 - DNA, 2365 bp, Homo sapiens
gcatttgttgggggcggagctttgacgggagcttcccgggagccgtttgtgcccggggtaaccccgttccggccaagccgcttcagcgggggacgtagccatgaaggaagagaaggagcacaggcctaaggagaagcgagtaaccctgttaacccccgccggggccacaggcagcggtggtgggacctcgggggacagctccaagggggaagataagcaggatcgcaacaaggagaagaaagaagcgctgagcaaggtggtaattcgaagattacctcccactttgaccaaggagcagcttcaggaacatcttcaacctatgcctgagcatgattattttgagtttttttctaatgatacgagtttgtatcctcatatgtatgccagagcatacatcaactttaaaaaccaagaggacattattttgttcagggatcgctttgatggttatgtattccttgacaataaaggtcaggaatatcccgctatagtagaatttgcaccttttcaaaaagctgcaaaaaagaagactaagaaaagagataccaaagtcgggactatcgatgatgatccagaatatagaaagtttttggaaagttatgccacagataatgagaaaatgacatctactccagagacactgctagaggaaatagaagcaaaaaatagagaattaatagctaaaaagacaaccccacttttgagcttcctgaaaaacaagcagagaatgagagaagaaaagagagaagaaaggaggaggagagaaatagaaagaaaaagacaaagagaagaagagaggaggaaatggaaagaagaagagaaacgaaaaaggaaagatatagaaaagctaaagaagatagacagaattccagaaagggacaaattaaaggatgaaccaaagattaagctgctcaagaagccagaaaaaggagatgaaaaagaattggacaaaagagaaaaagccaagaaattggacaaagagaatctcagtgatgaaagagccagtgggcaaagttgtacattgcccaagcgttctgatagcgaacttaaagatgaaaaaccaaagagacctgaagatgagagcggcagagactatagggagagggaacgggaatatgaacgagatcaggagcgcatacttcgagaaagagagaggctgaagcggcaagaagaagagcgccgtaggcagaaggagcgctatgagaaagagaagacttttaagagaaaagaagaagaaatgaaaaaagagaaagacacacttcgggataaaggaaagaaggctgaaagtacagaatcaataggcagctcagaaaaaactgaaaagaaagaagaagtggtcaagagagatcgaataagaaacaaggatcgtccagcgatgcagctttaccaaccaggagctcgaagccgaaatcgactctgtccccctgatgacagcaccaagtctggagattcagcagcagaaaggaagcaggaaagtggtattagccatagaaaagaaggaggagaggagtgataagtccagatggccttaggtgtcctgactgtctaggcagccaaagagcacacgttaagcaatccagaggtgccttcagggcaaagaatagagagaaagggagccgctgtgctggtggggtacactgcagaggagtaagtcttgtgtcaaagcaggaatctgatcagaggttcagaattggaagtacaatttcattgcttttgcaatttctacaaattaattttaaagtgtcagaaaaaggtgacggcaaggacatgcattgcaatttgcagggggaattgtcaagtgaggacttcatcacatatgacacgagagaaaagtaagagctggttctaaaatcaaaagctgttgttcatcctgaattgaattttctgaatttgggtggagcagagtcgctttgaagccttgttccgatctaattctattgtattgttgatgataagtgttgacattgggtagtgtagaagcaacaagcatgtccttgtagtacaggtacagtgaaggatagaacacactttcgttgatacaaaaatttaaatagttatgttacttctgtatccagtgtcctaaagttttaggattagttttagttttttgtttgcttatatgagcttagcgtaaagaatatttttaaacttcgtgttttgtcatcagcatcttttctattaagaggtaaaatgtagtccttgtttgactcttgacaatccagtgtgtttgatcttaggtctcatgatctgagtgcataccctctccaggaaggaaactgcaccagtgtctattcctgttaaatagcaacttttagtctcagcttgtttcgttttgatgtcaataaatagtaacagcattcaagtg

SEQ ID NO: 51 - DNA, 1810 bp, Homo sapiens
aggaagccgaggtctgaattgcgcgtggtggccatggcggccagcggggctgtggaaccagggcccccgggggctgccgtcgccccgtcgcccgccccggccccgccgcctgcccctgatcacctgttccggcccatcagcgccgaggacgaggagcagcagcccaccgagatcgagtcgctatgcatgaactgttactgcaatggcatgacgcgcctcctgctcaccaagattcccttcttcagagaaataatagtgagctccttttcctgcgagcactgtggctggaacaacacggagatccagtcggcaggcaggatccaggaccagggagtgcgctacactttgtctgtcagggctctggaggacatgaacagagaagtggtgaagactgactctgctgccacaaggattcctgagctagattttgaaattcctgcctttagccagaaaggagctctgaccactgttgaaggattgatcacccgtgctatctctggcctggagcaggaccagcctgcacgaagggcaaacaaagatgctacagctgaaagaattgatgagttcattgtcaaactgaaggagctaaagcaagtagcctcccctttcactctgatcattgatgatccctcagggaacagttttgtggaaaacccacatgctcctcagaaagatgatgccctggtgatcacacactacaaccggacccgacagcaggaagagatgctggggcttcaagaagaagcaccagcagagaagccagaagaggaagatctcagaaatgaagtgctccagttcagcacaaactgcccagaatgcaatgcccccgctcagaccaacatgaagctagtacaaatccctcactttaaggaggttatcatcatggctaccaactgcgagaactgtgggcatcggaccaatgaggtgaaatctggaggagcagtagaacccttgggcaccaggatcaccctccacatcacagatgcctcagatatgaccagagacctcctcaagtctgagacttgcagtgtggaaatcccagagctagaatttgaactgggaatggcagtcctcgggggcaagttcaccacactggaagggctgctgaaagacatccgggaactggtgaccaaaaatcctttcacactgggcgacagttccaatcctggacagacggagagactacaggagtttagccagaagatggaccagatcatcgaaggtaacatgaaggcccactttattatggatgatccagcaggaaacagttacttgcagaatgtgtatgcgcctgaagatgatcctgagatgaaggtggagcgttacaagcgcacctttgaccaaaatgaggagctagggctcaatgacatgaagacagagggctatgaggcaggcctggctccgcaacggtagcagtgggtggctcaagggccagcctccagcgctgctctttctgtaggttatttattagtattggatgaaggcgaaggctgggagtgtctttcccaccagcccttgcccatggtggggaggacatctggtctgagtcagagatctgtgcacactttctaaacagcttgtgatgcaagtgtgagcctattgtgttacttgaccttattttggaagttttgaattggcctaggaggaaacccagaaatgaaccaggggtatgtcatcacttttttcatatcaagtcctcaccctccttccacataatgctctatcctctaaggttggaactctgaagttggagaaggtggaataaagttacacctggaaaaaaaaaaaaaaaaaaaaaaaaaaaaaaaaa

SEQ ID NO: 52 - DNA, 1567 bp, Homo sapiens
ggtgcgcggggaggtggagggcgaggggcggggctacctcaggtcccgcccgcggcaggcctgtgggctgcgaggaggagctttgcctagcttgcaggcagcgcagggcagacggcggcaggagaagcaagatgaatgcaggctcagatcctgtggtcatcgtctcggcggcgcggaccatcataggttccttcaatggtgccttagctgctgttcctgtccaggacctgggctccactgtcatcaaagaagtcttgaagagggccactgtggctccggaagatgtgtctgaggtcatctttggacatgtcttggcagcaggctgtgggcagaatcctgttagacaagccagtgtgggtgcaggaattccctactctgttccagcatggagctgccagatgatctgtgggtcaggcctaaaagctgtgtgccttgcagtccagtcaatagggataggagactccagcattgtggttgcaggaggcatggaaaatatgagcaaggctcctcacttggcttacttgagaacaggagtaaagataggtgagatgccactgactgacagtatactctgtgatggtcttacagatgcatttcacaactgtcatatgggtattacagctgaaaatgtagccaaaaaatggcaagtgagtagagaagatcaggacaaggttgcagttctgtcccagaacaggacagagaatgcacagaaagctggccattttgacaaagagattgtaccagttttggtgtcaactagaaaaggtcttattgaagttaaaacagatgagtttcctcgccatgggagcaacatagaagccatgtccaagctaaagccttactttcttactgatggaacgggaacagtcaccccagccaatgcttcaggaataaatgatggtgctgcagctgtcgttcttatgaagaagtcagaagctgataaacgtgggcttacacctttagcacggatagtttcctggtcccaagtgggtgtggagccttccattatgggaataggaccaattccagccataaagcaagctgttacaaaagcaggttggtcactggaagatgttgacatatttgaaatcaatgaagcctttgcagctgtctctgctgcaatagttaaagaacttggattaaacccagagaaggtcaatattgaaggaggggctatagccttgggccaccctcttggagcatctggctgtcgaattcttgtgaccctgttacacacactggagagaatgggcagaagtcgtggtgttgcagccctgtgcattgggggtgggatgggaatagcaatgtgtgttcagagagaatgaattgcttaaactttgaacaacctcaatttctttttaaactaataaagtactaggttgcaatatgtgaaatcagaggaccaaagtacagatggaaaccatttcctacatcacaaaaacccaagtttacagcttgtactttactttaatgtgtaatactcaactcaaggtacaagacaattgcatttaacattgttataaataaaaggaacatcagatcaatcattaaaaaaaaaaaaaaaaaa

SEQ ID NO: 53 - DNA, 1234 bp, Homo sapiens
gggacagggggagccctataattggacaagtctgggatccttgagtcctactcagccccagcggaggtgaaggacgtccttccccaggagccgactggccaatcacaggcaggaagatgaaggttctgtgggctgcgttgctggtcacattcctggcaggatgccaggccaaggtggagcaagcggtggagacagagccggagcccgagctgcgccagcagaccgagtggcagagcggccagcgctgggaactggcactgggtcgcttttgggattacctgcgctgggtgcagacactgtctgagcaggtgcaggaggagctgctcagctcccaggtcacccaggaactgagggcgctgatggacgagaccatgaaggagttgaaggcctacaaatcggaactggaggaacaactgaccccggtggcggaggagacgcgggcacggctgtccaaggagctgcaggcggcgcaggcccggctgggcgcggacatggaggacgtgtgcggccgcctggtgcagtaccgcggcgaggtgcaggccatgctcggccagagcaccgaggagctgcgggtgcgcctcgcctcccacctgcgcaagctgcgtaagcggctcctccgcgatgccgatgacctgcagaagcgcctggcagtgtaccaggccggggcccgcgagggcgccgagcgcggcctcagcgccatccgcgagcgcctggggcccctggtggaacagggccgcgtgcgggccgccactgtgggctccctggccggccagccgctacaggagcgggcccaggcctggggcgagcggctgcgcgcgcggatggaggagatgggcagccggacccgcgaccgcctggacgaggtgaaggagcaggtggcggaggtgcgcgccaagctggaggagcaggcccagcagatacgcctgcaggccgaggccttccaggcccgcctcaagagctggttcgagcccctggtggaagacatgcagcgccagtgggccgggctggtggagaaggtgcaggctgccgtgggcaccagcgccgcccctgtgcccagcgacaatcactgaacgccgaagcctgcagccatgcgaccccacgccaccccgtgcctcctgcctccgcgcagcctgcagcgggagaccctgtccccgccccagccgtcctcctggggtggaccctagtttaataaagattcaccaagtttcacgcatcaaaaaaaaaaaaaaaaaaa

SEQ ID NO: 54 - DNA, 1455 bp, Homo sapiens
atgcgcgcagtcgcggaacccggaagcgggggtgcagcgcggcagaatgagggttgattcctcggctgaccccacaatgtcgcaggagcaagggccggggtcctccacgcctcccagttctccgacacttcttgacgctctgctccagaacctttacgactttggaggtacagaaggtgaaacagaacagaagaagatcataaagaaaagggaaaacaagaagagagatgtgatggcttcagcggccttggcagcagagccatctcccctacctggttctctcataagaggccagaggaagagcgcttcgagcttcttcaaggaacttagagaagagcggcattgtgctccttctgggacccccacaggaccagagatccttgctgctgcagttcctccctcttccctaaagaacaatagggaacaagtagaagtggtagaatttcacagcaataaaaaaagaaaattgacgccagatcataacaagaacacaaaggctaatcctagtgttttggagagagatgtggatacacaagaatttaacctagaaaaagctcgtttagaagtgcaccggtttggtatcacgggttatggaaaaggaaaggagagaatcctggaacaggaacgtgccattatgctgggcgctaagcctcctaaaaagagttatgtgaattacaaggttttacaggagcaaattaaagaaaaaaaggcagcaaaggaagaagaaaagagactggcccaagaaacagatattttcaagaaaaagaagaggaaaggacaggaggacaggaaatccaaaaagaagtccgctcccagtattttgtcaaatggacggattggacaggttggaaaattcaaaaatggaacactgattctgagcccagttgatatcaagaaaataaattcttccagagtggccaaatgaagtactttgtcaaataaaacgaggatgggaacaactgagtcaactgcagcggccctggaccctgtgcgactctagatagatcgttcttaacacgcatttcacagactgctttttcattttagaaaaaaagtcaaacagaagtaacatttctagttgccgaagtgtctgcttcatggtgctgaacgtgtcaggcccagtgcagcatgaatgtgaagtgaacccactgaaaagtgatttttaatgttctccagcaaacttcactcctgtttcatgttcactggtatttggtgcatttgcttgtaatacagttttttataactttactgttttgtaaatgctagtagtttacattaaattgccttatatttttaatgatttaatgttatgatatcatgaaagaaccaagaatctagtaatttatcagttttgtggaaaagcagttttaatttttagcctaccatgtgtacaaaatctacttcataagaagttatataaataaaataggtttgtagtataaaaaaaaaaaaaaa

SEQ ID NO: 55 - DNA, 1611 bp, Homo sapiens
agacgattggtcgggccacgccaggtacgaggagctagggttgtcctgccagggtagaatcggaaccgtaggaggggtacttaaccggacggcctaccaggcctgtggccgtgcgcgggaagagcactgcagcccaggcccaagccagcccggagagaaaagacctgaggaggtggccctggggctgcaccaccgcctcccagcactgggaagagccctggggcacagcattcagcaacgagcgacctccacagccaagacttggtgggacagatatgaagagtttgttggactcaacgaggttcgagaggcccagggaaaggtgacagagctcacaccccagtgacctcttctgggaatgcctcgctgggaatgcagctgagcctgtgtgggtgtggagagaaggtgcagatggcctccggttttctctttgcaggctgagaaagtgttcatggtggctcgagggcttgtccgagaggctcgggaggacttggaagttcaccaggccaagctgaaggaggtgagggaccgcttggaccgtgtctccagggaggacagtcagtacttggaactggctactctcgagcacaggatgctgcaggaggagaagaggcttcgcacagcctatctgcgtgcagaagactctgagcgagagaagttctccctcttctctgcagctgtgcgggaaagtcatgagaaggagcgcacaagggctgagaggaccaagaactggtccctcattggctcagtcctgggggccctgattggtgtggctggctccacctatgtgaaccgtgtgcgactacaggagctgaaggctttactcctggaggcgcagaaggggcctgtgagtctccaagaggccattcgagaacaggcgtctagctactcccgccagcagagggacctccacaatctcatggtggacctgaggggcctggtacatgctgctgggccagggcaggactctgggtcacaggcaggtagtcccccgaccagagacagagatgtagatgtcctttcagctgccttgaaagagcagcttagtcattccaggcaagtccattcatgtctagaaggcttacgagagcagcttgatggcctagaaaagacttgtagccaaatggctggggtggttcagcttgtaaagtctgcagcacacccaggcctggtggaaccagcagacggggctatgcccagcttcttgctggagcaggggagcatgatcttggcactgtcagacacggagcagagactagaagcccaagtcaacaggaacaccatctatagcaccctggtcacctgtgtgacatttgtggccacactgcctgtgctctacatgctattcaaagccagctaacccctggcccctcctccagagggtctgaggcaatagctgtgaatgtggatttaagtagagaatcgtagcaatgaagcgagcctttgggggcatgtacaacctcaatctgaaggagcagtatctgtgtggctcaccagcaggcatgcttcgctttgtagacaaggttcatttacattaattatcaaaactttgtgctaatgtccaattaaaatatcctgagttttattatttaaaacaaaaaaaaaaaaaaa

SEQ ID NO: 56 - DNA, 5793 bp, Homo sapiens
gctgctgctgcagtgggacaggtggcggcgaccggcggcgtccgaggagatttaatccagagactgacttcactatagaacccacagttgtatcaatggttggggaaagatagtggcaacaggcaaaggagaaacagctctgacatacaaagaaaatgagtatgctaaagccaagtgggcttaaggcccccaccaagatcctgaagcctggaagcacagctctgaagacacctacggctgttgtagctccagtagaaaaaaccatatccagtgaaaaagcatcaagcactccatcatctgagactcaggaggaatttgtggatgactttcgagttggggagcgagtttgggtgaatggaaataagcctggatttatccagtttcttggagaaacccagtttgcaccaggccagtgggctggaattgttttagatgaacccataggcaagaacgatggttcggtggcaggagttcggtatttccagtgtgaacctttaaagggcatatttacccgaccttcaaagttaacaaggaaggtgcaagcagaagatgaagctaatggcctgcagacaacgcccgcctcccgagctacttcaccgctgtgcacttctacggccagcatggtgtcttcctccccctccaccccttcaaacatccctcagaaaccatcacagccagcagcaaaggaaccttcagctacgcctccgatcagcaaccttacaaaaactgccagtgaatctatctccaacctttcagaggctggctcaatcaagaaaggagaaagagagctcaaaatcggagacagagtattggttggtggcactaaggctggtgtagtccggtttcttggggagaccgactttgccaagggggagtggtgtggcgtggagttagatgagccacttgggaagaatgatggcgctgttgctggaacaaggtattttcagtgtcaacccaaatatggcttgttcgctcctgtccacaaagttaccaagattggcttcccttccactacaccagccaaagccaaggccaacgcagtgaggcgagtgatggcgaccacgtccgccagcctgaagcgcagcccttctgcctcttccctcagctccatgagctcagtggcctcctctgtgagcagcaggcccagtcggacaggactattgactgaaacctcctcccgttacgccaggaagatctccggtaccactgccctccaggaggccctgaaggagaagcagcagcacattgagcagctgctggcggaacgggatctggagagggcggaggtggccaaggccacgagccacgtgggggagatagagcaggagctagctctggcccgggacggacatgaccagcatgtcctggaattggaagccaaaatggaccagctgcgaacaatggtggaagctgctgacagggagaaggtggagcttctcaaccagcttgaagaggagaaaaggaaggttgaggaccttcagttccgggttgaagaagaatcaattaccaaaggtgatcttgaggtggctacagtttcagaaaagtcacgtataatggaactggagaaagacctagcattgagagtacaggaagtagctgagctccgaagaaggctagagtccaataagcctgctggggatgtggacatgtcactttcccttttgcaagagataagctctttgcaagaaaagttagaagtcacccgtactgaccaccagagagaaataacttctctgaaggagcattttggagcccgggaagaaactcatcagaaggagataaaggctctgtataccgccacggaaaagctttccaaagagaacgagtcattgaaaagcaagctggagcatgccaacaaagagaactcagatgtgatagctctatggaagtccaaactggagactgccatcgcatcccaccagcaggcgatggaagaactgaaggtatctttcagcaaagggcttggaacagagacggcagaatttgctgaactaaaaacacaaatagagaaaatgagactagattaccaacacgaaatagaaaatttgcagaatcaacaagactctgaacgggctgcccatgctaaagagatggaagccttgagggctaaactgatgaaagttattaaagaaaaggaaaacagtctggaagccatcaggtcgaaactggacaaagcagaagaccagcatctcgtagaaatggaagacacgttaaacaaattacaggaagctgaaataaaggtaaaggagctagaggtactgcaagccaaatgcaatgaacaaaccaaggttattgataattttacatcacagctcaaggctactgaagaaaagctcttggatcttgatgcacttcggaaagccagttccgaaggtaaatcggaaatgaagaaacttagacagcagcttgaggcagctgagaaacagattaaacatttagagattgaaaagaatgctgaaagtagcaaggctagtagcattaccagagagctccaggggagagagctaaagcttactaaccttcaggaaaatttgagtgaagtcagtcaagtgaaagagactttggaaaaagaacttcagattttgaaagaaaagtttgctgaagcttcagaggaggcagtctctgttcagagaagtatgcaagaaactgtaaataagttacaccaaaaggaggaacagtttaacatgctgtcttctgacttggagaagctgagagaaaacttagcagatatggaggcaaaatttagagagaaagatgagagagaagagcagctgataaaggcaaaggaaaaactggaaaatgacattgcagaaataatgaagatgtcaggagataactcttctcagctgacaaaaatgaacgatgaattacgtctgaaagaaagagatgtagaagaattacagctaaaacttacaaaggctaatgaaaatgcaagttttctgcaaaaaagtattgaggacatgactgtcaaagctgaacagagccagcaagaagcagctaaaaagcatgaggaagaaaagaaagaattggagaggaaattgtcggacctggaaaagaaaatggaaacaagccacaaccagtgtcaggagctgaaagccaggtatgagagagccacttctgagacaaaaaccaagcatgaagaaatcctacagaacctccagaagacgctgctggacacagaggacaagctgaagggcgcacgggaggagaacagtggcttgctgcaggagctggaggagctgagaaagcaagccgacaaagccaaagctgctcaaacagcggaagatgccatgcagataatggaacagatgaccaaagagaagactgagactctggcctccttggaggacaccaagcaaacaaatgcaaaactacagaatgaattggacacacttaaagaaaacaacttgaaaaatgtggaagagctgaacaaatcaaaagaactcctgactgtagagaatcaaaaaatggaagaatttaggaaagaaatagaaaccctaaagcaggcagcagctcagaagtcccagcagctttcagcgttgcaagaagagaacgttaaacttgctgaggagctggggagaagcagggacgaagtcacaagtcatcaaaagctggaagaagaaagatctgtgctcaataatcagttgttagaaatgaaaaaaagagaatccaagttcataaaagacgcagatgaagagaaagcttccttgcagaaatccatcagtataactagtgccttactcacagaaaaggatgccgagctggagaaactgagaaatgaggtcacagtgctcaggggagaaaacgcctctgccaagtccttgcattcagttgttcagactctagagtctgataaggtgaagctcgagctcaaggtaaagaacttggagcttcaactcaaagaaaacaagaggcagctcagcagctcctcaggtaatacagacactcaggcagacgaggatgaaagagcccaggagagtcagattgatttcctaaattcagtaatagtggaccttcaaaggaagaatcaagacctcaagatgaaggtggagatgatgtcagaagcagccctgaatgggaacggggatgacctaaacaattatgacagtgatgatcaggagaaacagtccaagaagaaacctcgcctcttctgtgacatttgtgactgctttgatctccacgacacagaggattgtcctacccaggcacagatgtcagaggaccctccccattccacacaccatggcagtcggggtgaggaacgcccatactgtgaaatctgtgagatgtttggacactgggccaccaactgcaatgacgacgaaaccttctgatgaagcctccagtggagaactgggcttgctcagacgcactcgcattgacacaacgtaacaccagcattgtgtgtgcagacttcaggagaactcatgttattttttaaccccgtcaacaaatctaggaaaatattttgatcttcaacaaattgccctttagtctccccgtatgagttagaataataaatatttagtaggtgagttttcacctcgaattttgttttcttgatttttacgtttgaagacattgcaccagatgccattacatttattggccccccgaccttgtagaaaaacccctaccctcacaataccttatttaagtaactttaaattatgccgttacttttcatatttgcactaagatatttccaggctgcatttgtatatttagattttttggttaagctttgacactggaatgagttgaaaaaatgtgccattttgcattttcatctactcatttaaagtattttattcttattcaaagaaatatctgagctctttgcactacctgttatcagtagtgcctttacttcaggcttgataatacttaggtgtgattataaaatcatgaagcaggtaaagggaggggcaagcccccaaactgctgtggggacattttataatctatatgctgcacccacttaatctactgtggtgttttgtttattagttttgcataatttcagcttctatatattgtatgtatatattttttaaaaatctatattttgggaaaaaaacatacacaatgtgtctttctttttggacatttacctttttgaaaaagaaaacacttaaaatgatcattaggacataacagactaggccagacatagcatcttgtggctttgcaaccattttcatttgtttgttttccttttatttcttcaccagatttaaataactggaggaattttctccaatttttttttccttctctggcaggtatccccagcagtcaattaacaataagccagtataaaacacctaaataaccaatctacaatctcccttcacaagtttttttactgtttttagatgaatgtacgatgagaaattcaacgttaataattctggattttcttatcacaaaaaagaaaatgaaggacctcaaagcacctgaacagtttatcgaccagtttgaatctatttatcttcatttgaatgtcttctagaatatgtaaaaagtcataaaatgtatcttccatgctacatgtacaataagaacttctataattgtatatatgcctttgatgtattttcccctcaagattatcaactgtgtgttcgacagtgaatattcaatctggtaccagttgaaatttttggttataaatgtaatacgaattgtttcacaaacagaaaacatgtaaagcagtattaaaatttggccaaacaagtgttctgtatctactttaataaatggttattctttaaaaaaaaaaaaaaaaaa

SEQ ID NO: 57 - DNA, 2964 bp, Homo sapiens
ggaaagagtggtggcaggtgaagtcggagacgacagaggaactggtttcctccgccccgcaaggcacacagcctgccgacgccccattaatacatgtggaaggggaaagagactgaatggaggaatgaatacaacttgatccaggtcgtgcttcggaagcggtcactttacctgtgaacctctctgcctgacaaacgggcaatgtacggaatcaaccaccaagatggcggcgcccgtgaagaatccgcaattaggtcgccgtcatatgtcgcctaggaacgtacggaattcgacccacgtacggaatcggattccaagatgacggcatctatgaggaagtcacgcagtaggtgcagccatgttgcctgtacgtcgaggccgtacaagcagccgccgtacggactctactgacaaggtggcggcgccctcgggaaagccacattagagcgcggccatgttcccggcgaacatatggattcggccaccatacggatacgataagcaagatggcggcgcctgaggggtcttgggggctctaggccggccacctactggtttgcagcggagacgacgcatggggcctgcgcaataggagtacgctgcctgggaggcgtgactagaagcggaagtagttgtgggcgcctttgcaaccgcctgggacgccgccgagtggtctgtgcaggttcgcgggtcgctggcgggggtcgtgagggagtgcgccgggagcggagatatggagggagatggttcagacccagagcctccagatgccggggaggacagcaagtccgagaatggggagaatgcgcccatctactgcatctgccgcaaaccggacatcaactgcttcatgatcgggtgtgacaactgcaatgagtggttccatggggactgcatccggatcactgagaagatggccaaggccatccgggagtggtactgtcgggagtgcagagagaaagaccccaagctagagattcgctatcggcacaagaagtcacgggagcgggatggcaatgagcgggacagcagtgagccccgggatgagggtggagggcgcaagaggcctgtccctgatccagacctgcagcgccgggcagggtcagggacaggggttggggccatgcttgctcggggctctgcttcgccccacaaatcctctccgcagcccttggtggccacacccagccagcatcaccagcagcagcagcagcagatcaaacggtcagcccgcatgtgtggtgagtgtgaggcatgtcggcgcactgaggactgtggtcactgtgatttctgtcgggacatgaagaagttcgggggccccaacaagatccggcagaagtgccggctgcgccagtgccagctgcgggcccgggaatcgtacaagtacttcccttcctcgctctcaccagtgacgccctcagagtccctgccaaggccccgccggccactgcccacccaacagcagccacagccatcacagaagttagggcgcatccgtgaagatgagggggcagtggcgtcatcaacagtcaaggagcctcctgaggctacagccacacctgagccactctcagatgaggacctacctctggatcctgacctgtatcaggacttctgtgcaggggcctttgatgaccatggcctgccctggatgagcgacacagaagagtccccattcctggaccccgcgctgcggaagagggcagtgaaagtgaagcatgtgaagcgtcgggagaagaagtctgagaagaagaaggaggagcgatacaagcggcatcggcagaagcagaagcacaaggataaatggaaacacccagagagggctgatgccaaggaccctgcgtcactgccccagtgcctggggcccggctgtgtgcgccccgcccagcccagctccaagtattgctcagatgactgtggcatgaagctggcagccaaccgcatctacgagatcctcccccagcgcatccagcagtggcagcagagcccttgcattgctgaagagcacggcaagaagctgctcgaacgcattcgccgagagcagcagagtgcccgcactcgccttcaggaaatggaacgccgattccatgagcttgaggccatcattctacgtgccaagcagcaggctgtgcgcgaggatgaggagagcaacgagggtgacagtgatgacacagacctgcagatcttctgtgtttcctgtgggcaccccatcaacccacgtgttgccttgcgccacatggagcgctgctacgccaagtatgagagccagacgtcctttgggtccatgtaccccacacgcattgaaggggccacacgactcttctgtgatgtgtataatcctcagagcaaaacatactgtaagcggctccaggtgctgtgccccgagcactcacgggaccccaaagtgccagctgacgaggtatgcgggtgcccccttgtacgtgatgtctttgagctcacgggtgacttctgccgcctgcccaagcgccagtgcaatcgccattactgctgggagaagctgcggcgtgcggaagtggacttggagcgcgtgcgtgtgtggtacaagctggacgagctgtttgagcaggagcgcaatgtgcgcacagccatgacaaaccgcgcgggattgctggccctgatgctgcaccagacgatccagcacgatcccctcactaccgacctgcgctccagtgccgaccgctgagcctcctggcccggaccccttacaccctgcattccagatgggggagccgcccggtgcccgtgtgtccgttcctccactcatctgtttctccggttctccctgtgcccatccaccggttgaccgcccatctgcctttatcagagggactgtccccgtcgacatgttcagtgcctggtggggctgcggagtccactcatccttgcctcctctccctgggttttgttaataaaattttgaagaaaccaaggaaaaaaaaaaaa

SEQ ID NO: 58 - DNA, 4390 bp, Homo sapiens
acgagatggctgtgtgcgcaggcgcaagactagcgctcttgggaccggaagttaaggcgttcgcggcgtgtgaatccagggcctgaaaacccagaatgaacttgtgtccatcccagagatcactgcagatgtcatgaggtaccctttgtgtcaccagctcaagcaggcctctggccactttatcatctgtggtggtcctgtgccgtgaccaggaggaaaaattagctctttgaagagaaagtagttctctattgcaggcactggcctcttaaattgttgcaggtggggaatggatgagaatatttgttttgggtgatcagaactgagactcctattgtggattagtaacatgcctcctcctagaacaagggagggcagggatcgccgagaccaccaccgggctcccagcgaggaagaggccttggagaaatgggactggaattgtccagagacgcgtcgcctcttggaagatgccttcttccgtgaagaggattacatccgtcagggttctgaggaatgtcagaagttttggaccttctttgaacgcctgcagagattccagaatctcaagacctccaggaaggaggagaaagaccctggacagcccaagcacagcatcccagcgctggccgacctacctcgcacttacgacccacgttaccgcatcaacctctctgttcttggccctgccacgcggggctctcagggactgggcaggcacttgcccgcggagagagtggctgagttccgccgagccctgttgcactacctggactttggccagaagcaggcatttgggcgtctggccaagctgcagcgtgagcgggcagccctccccatcgcccagtatgggaaccgcatcctgcagacgctgaaggagcaccaggtggtggtagtggccggtgacaccggctgtggcaagtccactcaggtgccccagtacctgctggctgctggcttcagtcatgtggcgtgcacccagccccggcggatcgcctgcatctcactggccaagcgtgtgggctttgagagcctcagtcagtatggctcacaggtcggctaccagatccgctttgagagcacacgttcggcggccaccaagattgtattcctgacagtggggctgctcctgcgacaaatccagcgggaacccagcctgccccagtatgaggtcctgattgtggatgaagtccatgagcggcatctccacaacgatttcctcctgggcgtcctccagcgcctgttgcccacgcggcctgacctcaaggtcatcctcatgtcggccaccatcaacatctcgctcttctccagctatttcagcaatgcccctgtggtacaggtgcctgggaggctgttccccatcacggttgtgtaccagccgcaggaggcggagccgaccacgtccaagtcagagaagctggacccgcggcctttcctgagggtgctggagtccattgaccacaagtacccgcctgaggagcggggtgacctcctcgtcttcctcagcggcatggcggagatcagcgccgtgctggaggctgcccagacctatgccagccacacccagcgctgggtggtactgccactgcacagcgccctgtctgtggccgaccaggacaaggtatttgatgtggcaccccctggagtccggaaatgcatcctctccaccaacattgctgagacctcagtcaccattgacgggatccgcttcgtagtagattccggaaaggtgaaggagatgagctacgatccgcaggccaagctgcaacggctgcaggagttctggattagtcaggccagcgcagagcagcggaagggccgggcgggccgcacgggccccggagtctgcttccgcctctatgccgaatcggactatgatgccttcgccccctaccccgtcccagaaattcggagggtggccctggactcgttggtgctgcagatgaagagcatgagtgtgggggacccccgaaccttccccttcatcgagcccccaccaccagccagcctggaaaccgccatcctctacctccgggaccagggggccctggacagctcagaggccctcacacccattgggtccctgctagcccagctgcctgtggacgttgtgattgggaagatgctgatcctgggctccatgttcagcctggtggagcctgtgctcaccatcgcagccgcacttagcgtccagtcgcccttcacccgcagcgcccagagcagcccagagtgcgcggcagcacggcggccgctggagagcgaccagggtgaccccttcacgctcttcaacgtcttcaacgcctgggtgcaggtgaaatctgaacggagcagaaactctcgcaagtggtgccgccgccggggcatagaggagcatcgactgtacgaaatggccaaccttcggcgccagttcaaggagctgttggaggaccacgggctgctggctggggcccaggccgcgcaggtaggggacagctacagtcggttgcagcagcgccgggagcgccgggccctgcaccagctgaaacgccagcacgaggagggcgcggggcgcaggcgcaaggtgctgcggctgcaggaggagcaggacggcggctccagtgacgaggacagggctggcccagcccccccaggggccagtgatggcgtggacatccaggatgtgaagttcaagcttcggcatgacctggcgcagctgcaggccgctgccagctcagcccaggacctgagccgcgagcagctggctctgctgaagctggtgctgggccggggcctgtacccacagctggccgtccccgacgccttcaacagcagccgaaaggactcagaccagattttccacacgcaggccaagcagggcgccgtgctgcaccccacctgcgtcttcgctggcagccccgaggtgctgcacgcacaggagctggaggccagcaactgcgacggaagccgagacgacaaggacaagatgagcagcaaacaccagctcctcagcttcgtgtccctgctggagaccaacaagccgtacctggtgaactgcgtccgcatccctgccctccagtccctcctgctttttagccggtctttggacaccaatggtgactgctcccgcctggtggccgatggctggctggagctgcagctagcagacagtgaaagtgccatccgactcctggcggcttccctgcggctccgtgcccgctgggaaagtgccctggaccggcagctggcgcaccaggcccagcagcagctggaggaggaggaggaggatacgccagtcagccccaaggaggtggccaccctgagcaaggaactcctgcaattcacggcatccaagattccttacagcctccggcggctcacagggctagaagtccagaacatgtatgtgggaccccagaccatcccagccaccccccatcttcctggcctctttggcagctccaccctgtccccccaccccacaaaggggggctacgcagtcactgacttcctcacctacaactgcctcacgaatgacacagacctgtacagcgactgtctccgaaccttctggacctgcccccactgtggcctgcatgcgcccctcacgcccctggagcgcatcgcccatgagaacacctgcccccaggccccacaggatgggcccccaggggctgaggaagctgccctcgaaaccctccagaagacatctgtcctgcagaggccctaccactgcgaggcctgcgggaaggacttcctctttacacccacagaggtgctgcgccaccggaagcagcacgtgtgagctgggccaggagccctgcccacctccgtgcagctgacctgccctccagcccaggactaggggcaggactcttgcctgaacccccagcctgggcttagccctgtggtcctgtcccagtgcagagggcctggagcacggattgtgaataaagcctcacatgctgatacacactgttaggcctgcacctgcccatccagaaagcagcagctgccttgttagtcctccccagggtctagctttccttcttcctgctgcagggtgctgcctgaggggtcctgggtaggaggggcgttagagccagcagggacctcccatgtctccagattccaggtgcaggttcttagcacctccgcagccgctctctcttgagtccatcctcagtctctcctaccccttgaagtagggggaccctgaatttgcccatccacctgggtcactttgagagttgtgcaggggggctgggagcactggtgttcacgtgggaccacaggctgcaccataagacccactcacaataaaaaaataaaaggccgagccgggcatggttgctcactcccgtaataaaaaaataaaagaacaggctgagccgggaaaaaaaaaaaaaaaaaa

SEQ ID NO: 59 - DNA, 6400 bp, Homo sapiens
gcggcggcggcggggccggggcccggggcggcggcggcgggacgcgaggaccatggctgcctccgagcgccgcgccttcgcgcacaagatcaacaggacggtggccgcagaggtgcggaagcaggtgtcccgggaacgcagtggctccccccactccagcaggcgctgcagcagctccctgggggtcccactgactgaagttgtcgagcccctggactttgaggatgtacttctgagccggccaccagatgctgagcccgggcccctcagggacctggtagaattcccagctgatgacttggagctgctgctgcagccccgggaatgccggaccacggagcccgggatccccaaggatgaaaaactggatgcccaggtgagggccgcggtggagatgtatattgaggactgggtcattgtccacagaaggtatcagtacctgagtgcagcatacagccccgtcaccacagacacacagcgggagcgacagaagggcctcccccgccaggtctttgagcaggatgcttctggagacgagaggtccggccctgaggactcgaatgactcccggcgtggctcgggctccccggaagacacccctcgaagcagtggtgcctctagcatcttcgacctgaggaacctggcagctgactcattgctgccctctctgctagagcgggcggccccagaagatgtggaccggcgcaatgaaacccttcgacggcagcaccggcccccggccctgctcaccctctacccggcacctgacgaggatgaagccgtggaacgctgtagccgcccagagccaccccgcgagcactttggacaaaggatcttggtcaagtgtctgtcgctcaagttcgagattgaaattgagcccatctttgggatcttggctctgtatgatgtgcgggagaaaaagaagatctcggagaacttctacttcgacctgaactcggactccatgaaggggctgcttcgggctcatggcacccaccctgccatctccaccctggcccgctctgccatcttctctgtgacctacccctcacctgacatcttcctggtcatcaagttggagaaggtgcttcagcaaggggacatcagtgagtgctgtgagccttacatggtgttgaaagaagtggacacagccaagaacaaagagaagctagagaagctgcgcctggcggccgagcagttctgcacccgcctgggccgctaccgcatgcccttcgcctggacggccgtgcacttggccaacatcgtgagcagcgctgggcagctggaccgggactctgactcggagggcgagcgccggccagcctggacagaccgccgccgtcgggggccccaggaccgggcgagtagtggggacgacgcctgcagcttctctggcttccgtccagccacgctaactgtcacaaacttctttaagcaggaggctgagcgactcagtgacgaggacctcttcaagttcctggctgacatgaggcgcccgtcgtccctgctgcggcgactacgtcctgtgactgcccagctcaagatcgacatttctccggctcctgaaaatccccacttctgcctctcccctgagctgcttcatatcaagccctacccggaccccaggggccggcccaccaaggagattctggagttccccgcccgcgaagtctatgccccccataccagctacaggaacctgctgtacgtgtacccgcacagcctcaacttcagcagccgccagggctccgtgcgcaaccttgctgtgcgagtgcagtacatgacaggcgaggaccccagccaggctctgccggtcatctttggcaagtccagctgcagtgaatttacccgcgaggccttcacaccggtggtctaccataacaagtcccccgagttctacgaggagttcaagctgcatcttccagcctgcgtgacagagaaccatcacctgctgttcaccttctaccatgtcagctgccagccccggccgggcactgccctggagacacccgtgggctttacttggatcccactgctgcagcacgggcgcctgaggaccggccccttctgtctcccagtgtctgtggaccagccgccgcccagctattccgtgctcacacccgatgtggcgcttccgggcatgcgctgggtggacggtcacaagggcgtgttcagtgtggagctcacagccgtgtcctctgtgcacccccaggacccctacctggacaaattcttcaccctggtgcacgtcctggaggagggagccttcccattccggctcaaggacactgtgctgagcgagggcaacgtggagcaggagctgcgggccagtcttgcagcactgcgcctggccagccccgaaccccttgtggccttctcccaccacgtgctggacaagctcgtgcgtctggtcatcaggcccccgatcatcagtggccagattgtgaacctgggccgtggagcctttgaagcaatggcccatgtagtcagccttgttcaccggagcctggaggcagcccaggatgcccgcggtcactgcccacagctggctgcctacgtccactacgcctttcgccttcctggcactgagcccagcctcccggatggggcccctccagtgacagtgcaggctgccacactggcccgtggctctggtcgccccgcaagcctctacctggcgcgttccaagagcatcagcagcagcaaccctgacctcgccgtggcccctggctctgtggatgacgaggtttcccgcatcctggccagcaagctgcttcacgaggagctggctctgcagtgggtggtcagcagcagtgccgtacgcgaggccatcctccagcacgcctggttcttcttccagctcatggtgaagagtatggcgctgcacctgctgcttggccagcgactagacacaccccgcaagctgcgcttccccggacgcttcctggacgacatcactgccttggtgggctctgtgggcctggaggtcatcacccgtgtccacaaggatgtggagctggccgagcacctcaacgccagcctggctttcttcctcagtgaccttctgtccctggtggaccggggctttgtcttcagcctggtccgggcccactacaagcaggtggccacgcggctccagtcgtcccctaatccagcagccctgctgaccctgcgcatggaattcacccgcatcctgtgcagccacgagcactacgtgaccctcaacctcccctgctgccccctgtcacctccagcctcgccctccccctctgtgtcctccaccacctcccagagctccaccttctccagccaagccccggaccccaaggtgaccagcatgttcgaactgagtggaccattccggcagcagcacttcctagctgggctcctgctgacggagctggcactggccctcgaacctgaggctgaaggggcattcctgttgcacaagaaggccatcagtgctgtgcacagcctgctatgtggccatgacactgacccccgctacgccgaggccactgtgaaggctcgtgtggccgagctgtacctgccactgctatcgattgcacgggataccttgccacggctgcatgactttgctgagggcccaggtcagcggtcaagactggcctcaatgcttgactcagacacagaaggcgaaggggacattgcgggtaccatcaacccctctgtggccatggccattgctggtggccccctagcccctggctcccgggccagcatctcccaggggccaccaacggcttctcgcgcaggctgtgccctctctgctgagtcaagccggaccttgctggcgtgtgtgctgtgggtgctgaaaaacaccgagccggcgctcctgcagcgctgggccactgacctgacactcccccagctgggacgtctgttggatttgctgtacctttgcctagctgcctttgagtacaaggggaaaaaggcctttgaacgcatcaacagcctcacattcaaaaaatctctggatatgaaggcgcggctagaggaagccattctgggtaccatcggagctcgacaagaaatggttcggcgaagtcgtgagaggagcccgtttgggaatccggagaatgtgcgctggcggaagagcgtcacacactggaagcaaacctcagaccgcgtggacaagaccaaggatgaaatggaacacgaggccttggtggaagggaacctggcaaccgaggcaagcctagtggttctggacacactggagatcatcgtgcagacggtgatgctttcagaagcccgggagagcgtcttgggggcagtgctgaaggttgtgctgtacagcctgggcagtgcccagagtgccctcttcttgcagcatggcctggccacccagagggcccttgtgtccaagttcccggagctgctgttcgaggaggacacggagctgtgtgccgacctgtgcctgaggctcctacgacactgtggcagccgcatcagcaccatccgcacgcacgccagcgcctcgctgtacctgctcatgcgacagaacttcgagatcggccacaactttgcccgtgtgaagatgcaggtcaccatgtctctctcgtccctggtggggacgacgcagaacttcagtgaagagcacctgcgacgttcactcaaaaccatcctcacctatgctgaggaggacatggggctgcgggacagcaccttcgcagagcaggtccaggacctgatgttcaacctgcacatgatcctgacggacacggtgaagatgaaggaacaccaggaggaccctgagatgctcatcgacctcatgtacagaattgcccggggctaccagggctcaccggaccttcggctgacctggttgcagaacatggccgggaagcacgcggagctgggcaaccacgccgaggccgcccagtgcatggtgcacgcggccgccctcgtggctgagtacctcgccctgctcgaggaccaccgccacctgcccgtgggctgcgtttccttccagaacatctcatccaacgtgctagaggagtccgccatctccgacgacatcctgtcgcccgacgaggagggcttctgctccgggaagcacttcactgagctggggctggtagggttgctggaacaggcagccggctacttcaccatgggcgggctctacgaggcggtgaatgaggtctacaagaacctcatccccatcctggaagcccaccgtgactacaagaagctggccgcggtgcacggcaaactgcaggaggccttcaccaagatcatgcaccagagttccggctgggagcgcgtgttcgggacgtatttccgcgtgggcttctacggcgcccacttcggtgacctggatgagcaggagtttgtgtacaaggagccatcgatcacgaagctggcagagatctcacaccggctggaggagttctacacggagagatttggcgacgacgtcgttgagattatcaaagactctaaccctgtggacaagtccaagcttgactcacaaaaggcctacatccagatcacgtatgtggaaccgtactttgatacctacgagctcaaggaccgggtgacctactttgaccgcaactatgggcttcgcacattcctgttctgcacgccgttcacgccggatgggcgcgcacacggggagctgcccgagcaacacaagcgtaagacgctgctcagcaccgaccacgccttcccctacatcaagactcgcatccgtgtgtgccaccgggaggagacggtgctgacgccagtggaggtggccatcgaggacatgcagaagaagacacgggagctggcctttgccaccgagcaggacccaccagatgctaagatgctacagatggtgcttcagggctctgtagggcccaccgtgaaccagggtcccctggaggtggcccaggtgtttttagcagagatcccggaagaccccaagctcttccggcatcacaacaaattgcggctctgcttcaaggacttctgcaagaaatgtgaggatgcgctgcggaaaaataaggccctgattgggccggaccagaaggagtaccaccgtgagctggagcgcaactactgccgcctgcgggaggctctgcagcccctgcttacccagcgcctgccccagctgatggcacccaccccacccggcctcaggaactccttgaacagagcaagtttccgaaaggcagacctctgagcccacaaggaccaaagctgtacctagaggaaccagcacccgggcctcagctgtctgtgctgcgaggggagtctgccctggtgcccactgggctgtggggtgaccacactgtacttggggctgggccctctgcccctgtgtccccatctgtgtgcactgatgcttcctcccttttttaatttaaaatggtttttataagcaacc

SEQ ID NO: 60 - DNA, 7455 bp, Homo sapiens
cccgcctagcatggtgcggcggccgcgcgcgcggacatgggggagaagctggagctgagactgaagtcgcccgtgggggctgagcccgccgtctacccgtggccgctgccggtctacgataaacatcacgatgctgctcatgaaatcatcgagaccatccgatgggtctgtgaagaaatcccggatctcaagctcgctatggagaattacgttttaattgactatgacaccaaaagcttcgagagcatgcagaggctctgcgacaagtacaaccgtgccatcgacagcatccaccagctgtggaagggcaccacgcagcccatgaagctgaacacgcggccgtccactggactcctgcgccatatcctgcagcaggtctacaaccactcggtgaccgaccccgagaagctcaacaactacgagcccttctcccccgaggtgtacggggagacctccttcgacctggtggcccagatgattgatgagatcaagatgaccgacgacgacctgtttgtggacttggggagcggtgtgggccaggtcgtgctccaggttgctgctgccaccaactgcaaacatcactatggcgtcgagaaagcagacatcccggccaagtatgcggagaccatggaccgcgagttcaggaagtggatgaaatggtatggaaaaaagcatgcagaatacacattggagagaggcgatttcctctcagaagagtggagggagcgaatcgccaacacgagtgttatatttgtgaataattttgcctttggtcctgaggtggatcaccagctgaaggagcggtttgcaaacatgaaggaaggtggcagaatcgtgtcctcgaaaccctttgcacctctgaacttcagaataaacagtagaaacttgagtgacatcggcaccatcatgcgcgtggtggagctctcgcccctgaagggctcggtgtcgtggacggggaagccagtctcctactacctgcacactatcgaccgcaccatacttgaaaactatttttctagtctgaaaaacccaaaactcagggaggaacaggaggcagcccggcgccgccagcagcgcgagagcaagagcaacgcggccacgcccactaagggcccagagggcaaggtggccggccccgccgacgcccccatggactctggtgctgaggaagagaaggcgggagcagccaccgtgaagaagccgtctccctccaaagcccgcaagaagaagctaaacaagaaggggaggaagatggctggccgcaagcgcgggcgccccaagaagatgaacactgcgaaccccgagcggaagcccaagaagaaccaaactgcactggatgccctgcacgctcagaccgtgtctcagacggcggcctcctcaccccaggatgcctacagatcccctcacagcccgttctaccagctacctccgagcgtgcagcggcactcccccaacccgctgctggtggcgcccaccccgcccgcgctgcagaagcttctagagtccttcaagatccagtacctgcagttcctggcatacacaaagaccccccagtacaaggccagcctgcaggagctgctgggccaggagaaggagaagaacgcccagctcctgggtgcggctcagcagctcctcagccactgccaggcccagaaggaggagatcaggaggctgtttcagcaaaaattggatgagctgggtgtgaaggcgctgacctacaacgacctgattcaagcgcagaaggagatctccgcccataaccagcagctgcgggagcagtcggagcagctggagcaggacaaccgcgcgctccgcggccagagcttgcagctgctcaaggctcgctgcgaggagctgcagctggactgggccacgctgtcgctggagaagctgttgaaggagaagcaggccctgaagagccagatctcggagaagcagaggcactgcctggagctgcagatcagcattgtggagctagagaagagccagcggcagcaggagctcctgcagctcaagtcctgtgtgccgcctgacgacgccctgtccctgcacctgcgtgggaagggcgccctgggccgcgagctggagcctgacgccagccggctgcacctggagctggactgcaccaagttctcgctgcctcacttgagcagcatgagcccggagctctccatgaacggccaggctgctggctatgagctctgcggtgtgctgagccggccttcgtcgaagcagaacacgccccagtacctggcctcacccctggaccaggaggtggtgccctgtacccctagccacgtcggccggccgcgcctggagaagctgtctggcctagccgcacccgactacactaggctgtccccggccaagattgtgctgaggcggcacctgagccaggaccacacggtgcccggcaggccggctgccagtgagctgcattcgagagctgagcacaccaaggagaacggccttccctaccagagccccagcgtgcctggcagcatgaagctgagccctcaggacccgcggcccctgtcccctggggccttgcagcttgctggagagaagagcagtgagaagggcctgagagagcgcgcctacggcagcagcggggagctcatcaccagcctgcccatcagcatcccgctcagcaccgtgcagcccaacaagctcccggtcagcattcccctggccagcgtggtgctgcccagccgcgccgagagggcgaggagcacccccagtcccgtgctgcagccccgtgacccctcgtccacacttgaaaagcagattggtgctaatgcccacggtgctgggagcagaagccttgccctggcccccgcaggcttctcctacgctggctcggtggccatcagcggggccttggcgggcagcccggcctctctcacacctggagccgagccggccaccttggatgagtcctccagctctgggagcctttttgccaccgtggggtcccgcagctccacgccacagcaccccctgctgctggcacagccccggaactcgcttcctgcctctcccgcccaccagctctcctccagtccccggcttggtggggccgcccagggcccgttgcccgaggccagcaagggagacctgccctccgattccggcttctcagatcctgagagtgaagccaagaggaggattgtgttcaccatcaccactggtgcgggcagtgccaagcagtcgccctccagcaagcacagccccctgaccgccagcgcccgtggggactgtgtgccgagccacgggcaggacagtcgcaggcgcggccggcggaagcgagcatctgcggggacgcccagcttgagcgcaggcgtgtcccccaagcgccgagccctgccgtccgtcgctggccttttcacacagccttcggggtctcccctcaacctcaactccatggtcagtaacatcaaccagcccctggagattacagccatctcgtccccggagacctccctgaagagctcccctgtgccctaccaggaccacgaccagccccccgtgctcaagaaggagcggcctctgagccagaccaatggggcacactactccccactcacctcagacgaggagccaggctctgaggacgagcccagcagtgctcgaattgagagaaaaattgcaacaatctccttagaaagcaaatctcccccgaaaaccttggaaaatggtggtggcttggcgggaaggaagcccgcgcccgccggcgagccagtcaatagcagcaagtggaagtccaccttctcgcccatctccgacatcggcctggccaagtcggcggacagcccgctgcaggccagctccgccctcagccagaactccctgttcacgttccggcccgccctggaggagccctctgccgatgccaagctggccgctcaccccaggaaaggctttcccggctccctgtcgggggctgacggactcagcccgggcaccaaccctgccaacggctgcaccttcggcgggggcctggccgcggacctgagtttacacagcttcagtgatggtgcttctcttccccacaagggccccgaggcggccggcctgagctccccgctgagcttcccctcgcagcgcggcaaggagggctcggacgccaaccctttcctgagcaagaggcagctggacggcctggctgggctgaagggcgagggcagccgcggcaaggaggcaggggagggcggcctaccgctgtgcgggcccacggacaagaccccactgctgagcggcaaggccgccaaggcccgggaccgcgaggtcgacctcaagaatggccacaacctcttcatctctgcggcggccgtgcctcccggaagcctcctcagcggccccggcctggccccggcggcgtcctccgcaggcggcgcggcgtcctccgcccagacgcaccggtccttcctgggccccttcccgccgggaccgcagttcgcgctcggccccatgtccctgcaggccaacctcggctccgtggccggctcctccgtgctgcagtcgctgttcagctctgtgccggccgccgcaggcctggtgcacgtgtcgtccgctgccaccagactgaccaactcgcacgccatgggcagcttttccggggtggcaggcggcacagttggaggtaactaggatttctacctcaaccgcgagacctatgcaaggacggtgtggaccaactcgcgcccgcggcatggtgcccgccggcctgccgggctcccacccctggacggcagaggcaaggacggacgggagctccactgtgaatcggcggcacgcgccgcaggaggctgggactggtccagtttgtactgtcgatagttttagataaagtatttatcattttttaaaaagtataaacaattctgacttattttattccatctaagtggtaaaaggcaacttattgagaaatataaatatctatatatgagagctctatataaagacacgtgtctgcagggcgggcccgccagcggattcgccacagcctgccccggtgctatctcgtccccaggcccgcgcctgcctccacccgcttggtgctgactagacgctgacaacgccgaaccccgttctcggaaacgccgcccggccggctcccccgacgcgctgctcccgtaccaaaggcaggcccgtcgccaccacattcctcggaggcctccccgcggcctgagccccttcctgagcgccctggcgcctgccctgagctcttcacctttaccccggcactgtgaacccccagactgttcaccctccggggcgtgggttgcgcccttgcatgtgaaggggcctgcgcggtgacgcagctggccatgtgctgcgcgatggtgctgtgaggacggcgcgggcacgttgaacaagtgcatttacttttgtatttctcggctgtccatggctcgcagcatgccctgcgatgcggggcaggcctgtcgtgggtcccttggtgtttctgtacaggagagagtcacactaatgagtggcagtattttatagagatgtgatgagaatttataaatttcatagatttgacagcttttatttttagatggtataatgcacagtgaagaggaaagaaaagcgaggggaaaaaaccttatttattcaaacagtgcacaaaatggccccagcgtcagccccgaccctagacccctcagttgcagctcccagcagcccagacagagctgccggcgcccctgcctgccccacatcccttcctgtcagggccacgcctggcacccatcccttggagcctgtgctggttctcccagctgctgtgggtgtgctggggccagggtgcactgctgaaacctggcctctctggccctaggccccagggtgacgtcggccccccactctgcagccttggcgggtgcctgggactgggtgtggaaggagaggagctgaggccggggtgtagcaggcaggcagggccactccagtgcttctggagccctgagcagtcagggcctgggttgtctgagcagtggtggctctgtgccctccctggaggatgggatctgggagtctgagctccccgcatctggccctgggctgtgtggcacttgctgagcccaccttctcaagtgcttgctcctgtgagatggcatcggggagccccttccccaaggtgccacagatccaccctccagggagctgccagccctgtgttctggttcccaagggcaggatggacacacgtcacatccctaccacgtggcctccaaagggagccacggaggaaaggcttctgtggttgctaggtgggggagtcctgtgtgggagggcctgaagacccctgcttgtgcctggtgaggggggtgctgcctcccccagcccccaacaacctctcagacccccaccctccaacatagctgagttctgaagatggtgctccggacctgtcctcttaagtggtgcccagtgccctccccaccccacgttggtgctctcagctagaaggtgctgtgcctctgcctgagccccaagccccgagcctggccttcaggacaggcagcctgctctgtgtcgccacgggccggatacgccacagggttgatggcagagacggccgagtccctggtctagaacaagacacattctttaaacactgtattacttctgcctccctctaggtgacagtggcagtccgggtgccatcacgggtcctgcagatggccatgcagggctcctgcccacgcaggccaccgtatgttcaggacacgcactgggtctcagagccactggcccaggcagaagtctccttgagcccactgggtcatatgcgtgtcaccacacgtgaactagtgtggtggctgcctgcggacaccctcctgttctgagccctgggcctgtgttcttctcagacactcccagactgaggggtggtgtgtggcgggtggcagggtggctgtggagactggggatctggagcctggtgctggcacctggcctgagtttccgtgggcagctggcggggacctgtgctgctgctgctgactgtgggtgggcgggcggcgcctgggagtggctcttgctcaggaattgataggaaccctaaaaactaggataccccctcctcggcccatgaggcacgcacagtgacttatttaagacttcccccttaatttatctgcccccaggatgcgtcagtctgttcagtggtcagcaggccccccaccccccgccgactgccctcgccatcgtggtcagacccccctcccaacacaacacgctgctggtctgtgtcagcctttgtaacgtgggaggctctgccgtgtcttccgggtgaactgtatttggattgcgcgcattgtcacggtccgcccctgggctgcaggcgccccttcctctgggcacccctgcattctgcatccccacctctagacgctgtaataaacagactgttttcactcggaaaaaaaaaaaaaaaaaaaa

SEQ ID NO: 61 - DNA, 5010 bp, Homo sapiens
aactgggaggctccccagtttgtgggtaacatctgactctccctccccaaagagagactccagcgagagactggggatttggaggtccaagtcatggcagaactgggttgcttgctaggacacaaggttagcatgcccctgtagcagcaatgtgagaatcagaaaaggtgactgtgcatctcaagaagccgaatcaaaaagccaagccaaccacctaaccagtgattttcaagccctccagaatacccatcatatagcccctgaggtggcatggtgatgtctccatgagggaaccccttcccactcatcctgtcacgtatatcatagtgttcttgactgggccattcatctaagatgggatttaccctgtgaaacagggagaagacttatggaccccaagcatcatttcgagttgtagttgagtttttaaaagacatacatgcaaagttcctttgctttggaccctctgcattattaaagctgctgtattgctaacccagaactgctccagtgtcttgactgatcatcatggcttcagtttggaagagactgcagcgtgtgggaaaacatgcatccaagttccagtttgtggcctcctaccaggagctcatggttgagtgtacgaagaaatggcaaccagataaactggtggtagtttggaccagaagaagccgaaggaagtcttctaaggcacatagctggcaacctggaataaaaaatccctatcgtggtgttgttgtgtggcctgttcctgaaaacattgaaatcactgtaacactttttaaggatcctcatgcggaagaatttgaagacaaagagtggacatttgtcatagaaaatgaatccccttctggtcgaaggaaagctcttgctactagcagcatcaatatgaaacagtatgcaagccctatgccaactcagactgatgtcaagttaaaattcaagccattatctaaaaaagttgtatctgccgctcttcagttttcattatcttgcatttttctgagggaaggaaaagccacagatgaagacatgcaaagtttggctagtttgatgagtatgaagcaggctgacattggcaatttagatgacttcgaagaagataatgaagatgatgatgagaacagagtgaaccaagaagaaaaggcagctaaaattacagagcttatcaacaaacttaactttttggatgaagcagaaaaggacttggccaccgtgaattcaaatccatttgatgatcctgatgctgcagaattaaatccatttggagatcctgactcagaagaacctatcactgaaacagcttcacctagaaaaacagaagactctttttataataacagctataatccctttaaagaggtgcagactccacagtatttgaacccattcgatgagccagaagcatttgtgaccataaaggattctcctccccagtctacaaaaagaaaaaatataagacctgtggatatgagcaagtacctctatgctgatagttctaaaactgaagaagaagaattggatgaatcaaatcctttttatgaacctaaatcaactcctcctccaaataatttggtaaatcctgttcaagaactagaaactgaaaggcgagtgaaaagaaaggccccggctccaccagtcctctcaccaaaaacaggagtattaaatgaaaacacagtttctgcaggaaaagatctctctacttctcctaagccaagccctataccaagtcctgttttggggcgaaagccaaatgctagtcagtctttgcttgtatggtgtaaagaagttacaaagaactaccgaggagtaaaaatcaccaattttactacatcgtggagaaatggtttatctttttgtgcaatattacaccactttagaccagatttaattgactacaagtctctgaatcctcaagatattaaagagaacaacaaaaaggcatacgatggatttgccagcataggaatttcccgattattggaaccttctgatatggtattattagcaattcctgataaactgactgttatgacttatctctatcaaataagggcacatttcagtggccaagaactaaatgtcgttcagatagaggaaaacagcagtaaaagcacatataaagttggaaactatgaaacagatacaaacagttctgttgatcaagaaaaattctatgcagagcttagtgatctgaagcgggagcctgaactacaacagcctatcagcggagcagtagacttcttatcacaggatgactctgtatttgtaaatgatagcggggttggagagtcagaaagtgagcatcaaactcctgatgatcaccttagtccaagcacagcctccccttactgtcgcaggactaaaagtgacacagaaccccagaagtctcagcagagctctggaaggacttcaggatctgatgaccctggaatatgttccaatacagattcaacccaagcacaggttttgttaggcaaaaagagactattgaaagctgagactttagaattgagtgacttatatgttagtgataagaagaaggatatgtctccaccctttatttgtgaggagacagatgaacaaaagcttcaaactctagacatcggtagtaacttggagaaagaaaaattagagaattccagatccttagaatgcagatcagatccagaatctcctatcaaaaaaacaagtttatctcctacttctaaacttggatactcatatagtagagatctagaccttgctaagaaaaaacatgcttccctgaggcagacggagtctgatccagatgctgatagaaccactttaaatcatgcagatcattcatcaaaaatagtccagcatcgattgttatctagacaagaagaacttaaggaaagagcaagagttctgcttgagcaagcaagaagagatgcagccttaaaggcggggaataagcacaataccaacacagccaccccattctgcaacaggcagctaagtgatcagcaagatgaagagcgacgtcggcagctgagagagagagctcgtcagctaatagcagaagctcgatctggagtgaagatgtcagaacttcccagctatggtgaaatggctgcagaaaagttgaaagaaaggtcaaaggcatctggagaacaaaacagtaagttggtggacttgaagctgaagaagctcctagaagttcagccacaggtggcaaattcaccctccagtgctgcccagaaagctgtaactgagagctcagagcaggacatgaaaagtggcacagaagatctccggactgaacgattacaaaaaacaacagaacgttttagaaatcctgttgtgttcagcaaagattctacagtcagaaaaactcaacttcagtctttcagccaatatattgagaatagaccagagatgaaaaggcagagatcaatacaggaagatacaaagaaaggaaatgaggagaaggcagcgataactgaaactcagaggaagccatcagaagatgaagtgcttaataaagggttcaaagacaccagtcagtatgtagtaggagaattggcagcactagagaatgagcaaaagcaaattgacacccgtgccgcgctggtggagaagcgccttcgctatctcatggacacaggaaggaacacagaagaagaagaagctatgatgcaggaatggtttatgttagttaataagaaaaatgccttaataaggagaatgaatcagctctctcttctggaaaaagaacatgatttagaacgacggtatgagctgctgaaccgggaattgagggcaatgctagccattgaagactggcagaagaccgaggcccagaagcgacgcgaacagcttctgctagatgagctggtggccctggtgaacaagcgcgatgcgctcgtcagggacctggacgcgcaggagaagcaggccgaagaagaagatgagcatttggagcgaactctggagcaaaacaaaggcaagatggccaagaaagaggagaaatgtgttcttcagtagccatcagatcagaaagaatctctcccaacattttagagtcttgcttcccaaaccagaaaaagtcagactcattgttgatttaaaacttttaacattttgtttggctggattgtactactttacctctactttaccaccaccacccttttcctccctcctttccaaataatatacagaactccaaaatagcttcatttaaggatttttttgtgagttaacaatttccttgaaatcctgtgaaatagatttgcacagacaccttgtgagtgattggtattggaggtgttcaagaaactgttcgaaaaagaacaaaaacacttccctcgttattttctctcattttttgatgagaggaaaatttgaaacattattcttgttgttgttggtaatagcataatgacagtgggaggggtacaaggggataagaaaaatgtcatgatttttttccggtcctgccacatgtaacacttactctgttacctaaattttatagttagatcatatccaatctacttattaaactgtgttctatttaccagtggagtttttctgcagtggttgcgtttcactgtaaggataatggagttcctctcctctgctttcctcagaggatggtcctttaacatagccagaaacaagccctgtggtttgaaggtgagctgtgaggatgggactaattgatatgcaccagtttacaaagacagtcttatcatccgagaatacaccatctttttctctggataattatttcttacatcatgcttgattcctacattttgttgggtctcaacattggctcacgaatgctgttaatatttattctgtattgataaaaagtctgtcttgccactacaagtaaatcccccatttaatattttcttctttagcatagcactgtcattttttgtgaaaatggttatgtttatttattacaatactgagtcatatataaattttcaataaaagcagaaactttcttaccttaaaaaaaaaaaaaaa

SEQ ID NO: 62 - DNA, 5305 bp, Homo sapiens
tccttcctttccgtctctggccggctgggcgcgggcgactgctggcgaggcgcgtgggaccttacgctggttccccttcgtctcctctcccggcccgggccactagagagttcgctgacgccgggtgagctgagcctgccgccaagatgccggcctattttcagaggccggaaaatgccctcaaacgcgccaacgaatttcttgaggttggcaaaaagcagcctgctctggatgttctttatgatgttatgaaaagtaaaaaacatagaacatggcaaaagatacacgaaccaattatgttgaaatacttggaactttgcgtggatcttcgcaagagccacttggcaaaggaggggttataccagtataagaacatttgtcaacaggtgaacataaaatctctggaggatgttgttagggcatatttgaaaatggcagaggaaaaaactgaagctgctaaagaagaatctcagcagatggtcttagatatagaggatctagataatattcaaactcctgagagtgttctcctaagtgctgtaagtggtgaagacactcaggatcgtactgacagattacttttaactccatgggttaaattcctgtgggagtcttacaggcagtgtttggaccttcttagaaacaattctagagtagagcgcctgtaccatgatattgcccagcaagctttcaaattctgcctccaatacacgcgtaaggctgaattccgtaaactgtgtgacaatttgagaatgcacttatcgcagattcagcgccaccataaccaaagtacggcaatcaatcttaataatccagagagccagtccatgcatttggaaaccagacttgttcagctggacagtgctatcagcatggaattgtggcaggaagcattcaaagctgtggaagatattcacgggctattctccttgtctaaaaaaccacctaaacctcagttgatggcaaattactataacaaagtctcaactgtgttttggaaatctggaaatgctctttttcatgcatctacactccatcgtctttaccatctctctagagaaatgagaaagaatctcacacaagatgagatgcaaagaatgtctactagagtccttttagccactctttccatccctattactcctgagcgtacggatattgctcgacttctggatatggatggcattatagttgaaaaacagcgtcgccttgcaacactactaggtcttcaagccccaccgacacgaattggccttattaatgatatggtcagatttaatgtactacaatatgttgtcccagaagtgaaagacctttacaattggcttgaagtagaatttaacccattaaaactctgtgagcgagtcacaaaggttctaaattgggttagggaacaacctgaaaaggaaccggaattgcagcagtatgtgccacaactgcaaaacaacaccatcctccgccttctgcagcaggtgtcacagatttatcagagcattgagttttctcgtttgacttctttggttccttttgttgatgctttccaactggaacgggccatagtagatgcagccaggcattgcgacttgcaggttcgtattgatcacacttctcggaccctgagttttggatctgatttgaattatgctactcgagaagatgctccgattggtcctcatttgcaaagcatgccttcagagcagataagaaaccagctgacagccatgtcctcagtacttgcaaaagcacttgaagtcattaaaccagctcatatactgcaagagaaagaagaacagcatcagttggctgtcactgcataccttaaaaattcacgaaaagagcaccagcggatcctggctcgccgccagacaattgaggagagaaaagagcgccttgagagtctgaatattcagcgtgagaaagaagaattggaacagagggaagctgaactccagaaagtgcggaaggctgaggaagagaggctgcgccaggaagcaaaggagagagagaaggagcgtatcttacaggaacatgaacaaatcaaaaagaaaactgtccgagagcgtttggagcagatcaagaaaacagaactgggtgccaaagcattcaaagatattgatattgaagaccttgaggaattggatccagattttatcatggctaaacaggttgaacaactggagaaagaaaagaaagaacttcaagaacgcctaaagaatcaagaaaagaagattgactattttgaaagagccaaacgtttggaagaaattcctttgataaagagcgcttacgaggaacagagaattaaagacatggatctgtgggagcaacaagaggaagaaagaattactacaatgcagctagaacgtgaaaaggctcttgaacataagaatcgaatgtcacgaatgcttgaagacagagatttattcgtaatgcgactcaaagctgcacggcagtctgtttatgaggaaaaacttaaacagtttgaagagcgattagcagaagaaaggcataatcgattggaagaacggaaaaggcagcgtaaagaagaacgcaggataacatactatagagaaaaagaagaggaggagcagagaagggcagaagaacaaatgctaaaagagcgggaagagagagagcgcgccgaacgagcaaaacgcgaggaagagctacgagagtatcaggagcgggtgaagaaattagaagaagtggaaaggaaaaaacgccaaagggagttggaaattgaagaacgagaacggcgtagagaggaagagagaagacttggcgatagttccctttctagaaaggactctcgttggggagatagagattcagaaggcacctggagaaaaggacctgaagcagattctgagtggagaagaggcccgccagagaaggagtggagacgtggagaagggcgagatgaggacaggtctcatagaagagatgaagagcggccccggcgtctgggggatgatgaagatagagagccctctcttagaccagacgatgatcgggttccccggcgtggcatggatgatgacagaggccctagacgtggtcctgaggaagataggttctctcgtcgtggggcagacgatgaccggccttcctggcgtaacacagatgatgacaggcctcccagacgaattgccgatgaagacaggggaaactggcgtcatgcggatgatgacagaccacctagacgaggactggatgaggacagaggaagctggcgaacagctgatgaggacagaggaccaagacgtgggatggatgatgaccgggggccgaggcgaggaggcgctgatgatgagcgatcatcctggcgtaatgctgatgatgaccggggtcccaggcgagggttggatgatgatcggggtcccaggcgaggcatggatgatgaccggggtcccaggcgaggcatggatgatgaccggggtcccaggcgaggcatggatgatgaccggggtcccaggcgagggttggatgatgatcgaggaccttggaggaacgccgatgatgacagaattcccaggcgtggtgcagaggatgacaggggcccttggagaaacatggatgatgatcgcctttcaagacgtgctgatgatgatcggtttcccagacggggtgatgactcaagacctggtccttggagaccattagtcaagccaggtggatggagagagaaagaaaaagccagagaggagagctggggtccacctcgagaatcaaggccatcagaagaacgtgaatgggacagagaaaaagaaagggacagagataatcaagatcgggaggagaatgacaaggaccctgagagagaaagggacagagagagagatgtggatcgagaggatcgcttcagaagacctagggatgaaggtggctggagaagaggaccagctgaggaatcttcaagctggagagactcaagtcgccgggacgatagggatagggatgaccgtcgccgtgagagggatgaccggcgtgatctaagagaaagacgagatctaagagacgacagggaccgaagaggacctccactcagatcagaacgtgaagaagtaagttcttggagacgtgctgatgacaggaaagatgaccgggtggaagagcgggaccctcctcgtcgagttcctcccccagctctttcaagagaccgagaaagagaccgagaccgagaaagagaaggtgaaaaagagaaggcctcatggagagctgagaaagatagggaatctctccgtcgtactaaaaatgagactgatgaagatggatggaccacagtacgacgttaagtctcaagataatggatttaaactggtgtcttaaataggtttgatcacattcaaggattattatacttgtgcttcaaccaatctaaattggattctttaatgttgtttcaccataacacaaaaagcatgaacttgtattaatcctatataatagattgatcatgcaccatatccacaggaggttggaaaaaccatgccattttctggaatttaagggtgttgcattatttcatcaatcatttgttgacaaaaaagaaaaactaaaaaataaatttaaaatgtgacccttcaggtattgagtaacacctttatcttggtatagaactgatactttttttttgattttgaaatatctgataataatttggaatgaagtaaggttctgttaaaatatatttgaagaccctttaaagcagtgaatctgaaacaattttcacacccttaagtggttgatacgtacctattttaggtattttgaggtatttaccataaactaaatttagaaattttttagattcacttgaagtaaacattacaaacattggatacggtggggttttctttagattttacttgagagaaggtgagtacaaagcaatttgcagttgttgtaatgacaagattactgcgcaagtgtgaatccaaacagtatagcttttaaattttaaagcatttggtaaattatcgctgagtttttttctgttgccaatagcaaactgcttttccattaatggagaattcatgcctttcaagcattttaaatatgacaatatttataaatgtatggtttggaggaatcgtttaaattctctttcctaattttctttcttttgaagatagattctttcaacaagtaatttgtagtaatgactgtgttgacttcaattttggagcgcagtagctatgttaaagatgaactatttggtctcattgaagccaacacagaacttgctgctgtgttttttcttcagtgataaataaaatacttacagaatttgttttagtgttga

SEQ ID NO: 63 - DNA, 3797 bp, Homo sapiens
gcagacggcaaccgggccgctgattgggcggcgaaggagccattcggggagactctggtgggttcggctgccccaagagtgataagttcggcttcagacacgccttagcgccagcagtgagtcggagctctatggaggtggcagcgggtaccgagtggcggctgcagcagcgactcctctgagctgagtttgaggccgtccccgactccttcctcccccttccctcccccttttttttgttttccgttcccctttcccctcccttccctatccccgacgaccggatcctgaggaggcagctgcggtggcagctgctgagttctcggtgaaggtatttcatttctcctgtcccctcccctccccaccccatctattaatattattcttttgaagattcttcgttgtcaagccgccaaagtggagagtgcgattgcagaagggggtgcttctcgtttcagtgcttcttcgggcggaggaggaagtaggggtgcacctcagcactatcccaagactgctggcaacagcgagttcctggggaaaaccccagggcaaaacgctcagaaatggattcctgcacgaagcactagacgagatgacaactccgcagcaaacaactccgcaaacgaaaaagaacgacatgatgcaatcttcaggaaagtaagaggcatactaaataagcttactcctgaaaagtttgacaagctatgccttgagctcctcaatgtgggtgtagagtctaaactcatccttaaaggggtcatactgctgattgtggacaaagccctagaagagccaaagtatagctcactgtatgctcagctatgtctgcgattggcagaagatgcaccaaactttgatggcccagcagcagagggtcaaccaggacagaagcaaagcaccacattcagacgcctcctaatttccaaattacaagatgaatttgaaaaccgaactagaaatgttgatgtctatgataagcgtgaaaatcccctcctccccgaggaggaggaacagagagccattgctaagatcaagatgttgggaaacatcaaattcattggagagcttggcaagcttgatcttattcacgaatctatccttcataagtgcatcaaaacacttttggaaaagaagaagagagtccaactcaaagatatgggagaggatttggagtgcctctgtcagataatgaggacagtgggacctagattagaccatgaacgagccaagtccttaatggatcagtactttgcccgaatgtgctccttgatgttaagtaaggaattgccagcaaggattcgtttcctgctgcaggataccgtagagttgcgagaacaccattgggttcctcgcaaggcttttcttgacaatggaccaaagacgatcaatcaaattcgtcaagatgcagtaaaagatctaggggtgtttattcctgctcctatggctcaagggatgagaagtgacttctttctggagggaccgttcatgccacccaggatgaaaatggatagggacccacttggaggacttgctgatatgtttggacaaatgccaggtagcggaattggtactggtccaggagttatccaggatagattttcacccaccatgggacgtcatcgttcaaatcaactcttcaatggccatgggggacacatcatgcctcccacacaatcgcagtttggagagatgggaggcaagtttatgaaaagccagattagcctgaggcctgctcagtcgttcctaatgaataaaaatcaagtgccaaagcttcagccccagataactatgattcctcctagtgcacaaccaccacgcactcaaacaccacctctgggacagacacctcagcttggtctcaaaactaatccaccgcttatccaggaaaagcctgccaagaccagcaaaaagccaccaccgtcaaaggaagaactccttaaactaactgaaactgttgtgactgaatatctaaatagtggaaatgcaaatgaggctgtcaatggtgtaagagaaatgagggctcctaaacactttcttcctgagatgttaagcaaagtaatcatcctgtcactagatagaagcgatgaagataaagaaaaagcaagttctttgatcagtttactcaaacaggaagggatagccacaagtgacaacttcatgcaggctttcctgaatgtattggaccagtgtcccaaactggaggttgacatccctttggtgaaatcctatttagcacagtttgcagctcgtgccatcatttcagagctggtgagcatttcagaactagctcaaccactagaaagtggcacccattttcctctcttcctactttgtcttcagcagttagctaaattacaagatcgagaatggttaacagaactttttcaacaaagcaaggtcaatatgcagaaaatgctcccagaaattgatcagaataaggaccgcatgttggagattttggaaggaaagggactgagtttcttattcccactcctcaaattggagaaggaactgttgaagcaaataaagttggatccatcccctcaaaccatatataaatggattaaagataacatctctcccaaacttcatgtagataaaggatttgtgaacatcttaatgactagcttcttacagtacatttctagtgaagtaaacccccccagcgatgaaacagattcatcctctgctccttccaaagaacagttagagcaggaaaaacaactactactatctttcaagccagtaatgcagaaatttcttcatgatcacgttgatctacaagtcagtgccctgtatgctctccaggtgcactgctataacagcaacttcccaaaaggcatgttacttcgcttttttgtgcacttctatgacatggaaattattgaagaagaagctttcttggcttggaaagaagatataacccaagagtttccgggaaaaggcaaggctttgttccaggtgaatcagtggctaacctggttagaaactgctgaagaagaagaatcagaggaagaagctgactaaagaaccagccaaagccttaaattgtgcaaaacatactgttgctatgatgtaactgcatttgacctaaccactgcgaaaattcattccgctgtaatgttttcacaatatttaaagcagaagcacgtcagttaggatttccttctgcataaggtttttttgtagtgtaatgtcttaatcatagtctaccatcaaatattttaggagtatctttaatgtttagatagtatattagcagcatgcaataattacatcataagttctcaagcagaggcagtctattgcaaggaccttctttgctgccagttatcataggctgttttaagttagaaaactgaatagcaacactgaatactgtagaaatgcactttgctcagtaatacttgagttgttgcaatatttgattatccatttggttgttacagaaaaattcttaactgtaattgatggttgttgccgtaatagtatattgcctgtatttctacctctagtaatgggctttatgtgctagattttaatatccttgagcctgggcaagtgcacaagtctttttaaaagaaacatggtttacttgcacaaaactgatcagttttgagagatcgttaatgcccttgaagtggtttttgtgggtgtgaaacaaatggtgagaatttgaattggtccctcctattatagtattgaaattaagtctacttaatttatcaagtcatgttcatgccctgattttatatacttgtatctatcaataaacattgtgatacttgatgtagtga

SEQ ID NO: 64 - DNA, 2766 bp, Homo sapiens
agaaggcgcgatgttgacggggtcctaagatggctgctgggcgaccacttcctgacagctccagttaatgggactgccagcaggctagacatccttcgccggaatgtgcagcgcttagttctgtgcccgggaggggcttctctctcttttgggattggagtgtggcattgccgccagaaagcctgcagaattccgggttgtgcagccaagcaggaacggtgtacctttctagacccatcctcttgcaatcttggaccctaagaaaagatgtggagtgggctgctacctcctggcctaaatgaaagtgacgctgagtcaaactcggaagatgaagctacgttggagaactctggacttaacttacaggaagataaagaggatgagagcatcagaaaaacagaaatcatagatttctcaacagatgaaccaaaaactgaaacagagtcaaatgtaaatgcctatgaagagtgtccttctggaattcccatagatatgtggaataaatttcaagaattgcataaaaaacattctgaacagaaaagcacaacctcaagattcagagggaaaagaagaaaacgctccagaaaagataaattgaagaatgaaaaagaattacatagtgaaccgtcctcaaatgaaacccagtggaaagagcttactcagtattttggagtcaatgatagatttgacccgcctgttaaaaggaaaaaagttgagaagtcaggccttgaaaagaggatagaccaggctgtggaggagtggaatattgagaaggctgaggaactcagcaaccagctagctactcgagagcttggtgtaaaaattgccaaagcagttgcctgccacaactttgtaaaagccaaaaaggaggttgaaaattcacaggctgcccgaaaaaagaagaaacttgcatgggggtttgaagcaaagaagagatgggaaaccaaaagcaacatgggatacatgtaacttgccagagtgcttcaagacatttgtagactcaaatgctcaatttactgagaatgttttcctgcctatgttaatatgtcagaaaattgatagcactaaaacaaaaataagcataaaatttgggattttgattatcagctcttttcagtctttctttaaggactttgtcctattgaagtgaataaaatgaagcattctgttatttgtataagaaatgtaagaaaaaaaatatagaaagaagaggataggattttgtttatttgtatggatggacccttggtataaaatcacttttggcgctttccattcatttggtttagcacagccagtgagcttctcgtactttctttctttttttttttttttttgagacagagcctcgcttgctctgtcacccaggctagagtgcagtagcacgatcttggctcactgcaaccactgcttcctgggttcaagtgattctcatgcctcagcctcctgagtagctgggattatggacaaatgccaccacacccggctaattttttttttttttttgtatttttagtagagacagagttttgctgtgttggtcaggctggtcttgaactcctggcctcatatgattcacctgcctctgcctcccaaagttctgggagtacagacatgagctaccatgctgcccttgtattttcttatctgtacccagtgtaactacacgtttactggaactgtgtttttaagactgacagttgtttataatggattagtcgtaagtaccaaaaagtctcagttgatattatctttacaaatgacttgaccttaatgttataaaagtagttactgtttttttttaattggaggcagacttgatatttcagagttgcatagtaaaagcaatttgttaatttttgtgtactttcagataaactattacaataaagaaaggagcagaatgtagtatttggaagatgatttaaattcagcaacgcctaaaaatgtcttcctaagtatttttctcagccatgtcattctttaaattatgagatggttcttagaagagaaaatggtgtaattgtattaaacagacaattataactcaagataatataactttgaaccttctaagaactgatttgtttggttttcctcccattccccattcctccttaaaagattgaatgaattaatgagcagaaagagaggattggtaacatgggaaatcgttttcattagatgtacatttcctggttctgacaggaaaggggctccagaaaatcataaaacaagcaggtgaacaagaccaggtgtgtcggcacctccctgctcagtgcccagcggaggtaaagaaccactcagcatggtttttgtcagttcacctcttctgtcgttgtcagaggtttcctacctgtctgatataaactttctctgggttgataatataaattcagaaacatgtaaaatgaatcatgattatattactgttatttttagacttaaaatagtaacaaaattttatttatggtggcacatttaatggctttttttttctgtgttctggaataagagaatacctagctactatttaagcatccaaaaatcatatcttgctttcatttagttgagaaaagccagcatagagaaagcaaagttttagaatattatgtgtcatactaattcagtatccagaccaaatgttggaaagtcttattttatgatttaatatcccttgttccattttacagatatgatcatgtaaaacttacctacaatattcatttcaaactgctaaattaggtaaatacagacttttagtat

SEQ ID NO: 65 - DNA, 2172 bp, Homo sapiens
aaaacggcatttccgggaagatggcggcgcacaagtcaggtccggcacatgtttccgcggagcggacccagcaatgacggatgatatcacctcttcttctctggtgagagtctgaggatagagacttttttctcaccatgaatgtcaccccagaggtcaagagtcgtgggatgaagtttgctgaggagcagctgctaaagcatggatggactcaaggcaaaggcctcggccggaaggagaatggtatcactcaggctctcagggtgacactgaagcaagacactcatggggtaggacatgaccctgccaaggagttcacaaaccactggtggaatgagctcttcaacaagactgcggccaacttggtagtggaaactgggcaggatggagtacagataaggagcctttctaaggagaccacccgttataatcatcccaagcccaacttgctgtatcagaagtttgtgaagatggctacattgacttcaggtggagagaagccaaacaaagacttggagagctgcagtgatgacgacaaccaggggtccaagtccccaaagattctgactgatgagatgctgctccaagcctgtgaggggcgaacagcacacaaggctgcccgtcttgggatcacaatgaaggccaagcttgctcgcctagaggcccaggagcaggccttcctggctcgtctcaaaggccaggaccctggggcccctcaactgcagtcagagagcaagccccccaaaaaaaagaaaaagaaaaggaggcagaaagaggaggaagaagctacagcatctgaaaggaatgatgcagatgagaagcacccagaacatgctgagcagaacatcagaaaaagcaagaagaagaaaaggcgacatcaagaaggaaaggtctcagatgaaagagagggtacaactaaagggaatgagaaggaggacgctgcaggaacaagtgggcttggggaattgaatagcagagagcaaaccaatcagtccctcaggaaagggaagaaaaagaagaggtggcaccatgaagaggagaagatgggggtcttggaggaaggaggaaaaggcaaggaggctgcaggcagtgtcaggacagaggaggtagagagcagggcatatgctgacccatgcagccgaagaaagaagaggcagcaacaggaggaggaggacttgaacctagaagatagaggtgaggaaacttttaggtggtggaaccagggaagcagagagcagagcatgcagtgatggaagaagcaggaaaagcaagaagaaaagacagcagcatcaagaggaggaggacatcttggatgtaagggatgagaaggatggcggggctagggaagcagagagcagagcacacactggctcaagcagcagaggtaagaggaagaggcagcagcatcccaagaaggaaagagctggagtcagcactgtccagaaagccaaaaagaaacagaagaagagagactaaaggtctggtaaaggtagggctcaattgattgattttcaggagttgaagcctcaaagaccagggttgatgcaggtctgcaggtcttctgcacccccctcaatgaggagtccctcccagaaaggaaactgatctctgggacgtcagctgctgagaggagcaagcggtagtaccaccccttagttgagggagtcagcacagtcctttctgcagcttctaacccaggaccatgaactcaggtgcctagagaagccaggcagctaaaggacaaggaatgctgggggctgtgggaacaggaatgcagataccctttgaaggagcattcctgctaaaagaagctgaaaatgtagacctatgtgaagtgctctgatttctaaatattgtgaaggttaagaaaaacataaatttaggtctatgggctagatttagcccacagttgccagtttctagcgctaccaaatgaatgaataaacatgagcttgcgctcctagcctagagataaatcctgactggcatctctgttcccagcctgggaaggtcctgaatacaaattagaagatattccttggaggcctttgaagaaattccttcggttaacctctttgtagtcttgctacactgataagtagaagtagctccctgtctgtgtcccaaatgaataagaattgtgtaaaggacagcaaaaaaaaaaaaaaaaaa

SEQ ID NO: 66 - DNA, 863 bp, Homo sapiens
ccagcggctgcggcggcggagctcctccgaggtccgggtcaccagtctctgctcttcccagcctctccggcgcgctccaagggcttcccgtcgggaccatgcgcggccgtgagctcccgctggtcctgctggcgctggtcctctgcctggcgccccgggggcgagcggtcccgctgcctgcgggcggagggaccgtgctgaccaagatgtacccgcgcggcaaccactgggcggtggggcacttaatggggaaaaagagcacaggggagtcttcttctgtttctgagagagggagcctgaagcagcagctgagagagtacatcaggtgggaagaagctgcaaggaatttgctgggtctcatagaagcaaaggagaacagaaaccaccagccacctcaacccaaggccctgggcaatcagcagccttcgtgggattcagaggatagcagcaacttcaaagatgtaggttcaaaaggcaaagttggtagactctctgctccaggttctcaacgtgaaggaaggaacccccagctgaaccagcaatgataatgatggcctctctcaaaagagaaaaacaaaacccctaagagactgcgttctgcaagcatcagttctacggatcatcaacaagatttccttgtgcaaaatatttgactattctgtatctttcatccttgactaaattcgtgattttcaagcagcatcttctggtttaaacttgtttgctgtgaacaattgtcgaaaagagtcttccaattaatgcttttttatatctaggctacctgttggttagattcaaggccccgagctgttaccattcacaataaaagcttaaacacattgtccaaaaaaaaaaaaaaaaaa

SEQ ID NO: 67 - DNA, 2245 bp, Homo sapiens
aacttccggcgtccgtcgggcagcagcggggctgtctatcccggctgaggacccgcggccagtgcgggtggctggctttgccattagcgggggcctttcctgaggacggcgtacggagtgtggggaatgaaggatggcagcatgccgtgcattaaaagctgttttggtagatctcagtggcacacttcacattgaagatgcagctgtgccaggcgcacaggaagctcttaaaaggttacgtggtgcttctgtaatcattaggtttgtgaccaatacaaccaaagagagcaagcaagacctgttagaaaggttgagaaaattggaatttgatatctctgaagatgaaatattcacatctctgactgcagccagaagtttactagagcggaaacaagtcagacccatgctgctagttgatgatcgggcactacctgatttcaaaggaatacaaacaagtgatcctaatgctgtggtcatgggattggcaccagaacattttcattatcaaattctgaatcaagcattccggttactcctggatggagcacctctgatagcaatccacaaagccaggtattacaagaggaaagatggcttagccctggggcctggaccatttgtgactgctttagagtatgccacagataccaaagccacagtcgtggggaaaccagagaagacgttctttttggaagcattgcggggcactggctgtgaacctgaggaggctgtcatgataggagatgattgcagggatgatgttggtggggctcaagatgtcggcatgctgggcatcttagtaaagactgggaaatatcgagcatcagatgaagaaaaaattaatccacctccttacttaacttgtgagagtttccctcatgctgtggaccacattctgcagcacctattgtgaagcaatgtgtgcatctgaagcaacttgaaatgcagcttcttattgtctggaatgaatcccttaccaactcagtgccagcatcggtagacaccagtcagtgctgatcgctttttaaccctcttttgttgtgcattaattagaaagaaaggtattgaattgcggctagccagtaagccttgctaatctcttttattttgtaactgaagatgagacccaaagaaagggaaagctgagattttgtgccattccttttaaaatattcatcaggttaggtggggctgtgggggaaaagctactacagggaagagtgttctctgctgtctcttcactggaaaacagggaggggggatttcagactgtgaagaaagttgaatggtggtttttaaattataaagtaatgtattaaaaggtgcattaggctgtagttctaatattgagttcaactgtgaaatccatcagatgtgccaaatggagaagacagaaagcaacaaagtgaattgttctttagcccaagtggtacagtgaatttgctttaacagatgttgaaaactaaattttctactgtattcccagcacgggtgacttctttttctcttcattagccagagatgactaatttaaatttagaaccagattttaatttaaattaatatttccattaataacctattcattgcagatacctattatactgtgtaacagttgttttggaaattttatgtaaaattaaaactatcagtattttacagatgttttaattagacattgttattaacaggaacagtgcagaaactagaatcaagccttataatatcttatagaccatgcatttttgaagttagtgtccactagggtcctattaactgtacatttgcaagatttcattatttttgcctctgacactatgggaaaaattttttagaagctattgggacagattcaagcttttatgcacttggttactacagctgtaaaatgaaatctcgtcttgtagcatggattattcttctcatgttaaacccaccaaaataaaggggactaaataggtaatgattttcctagtgcatttgcatactgtgataatcctgggccttgcaatagttctacagggctcttgggcattgaattattaggatgtaattgtacatcattgtagtgttcaccttattgaagctcactctgatgttaatgagcttcgggttttgatgcttgtttagagatcagcagtcttggatgggagggaacaaagctaaataaatgttagtttggtgaaaaaaaaaaaaaaaaaaaaaaaaaaaaaaaaaaaaaaaaaaaaaaaaaaaaaaaaaaaaa

SEQ ID NO: 68 - DNA, 1480 bp, Homo sapiens
ggtgactgacggcgccggccgcccctgcccgtcgcccgcccgctgctgccgcccgcccggggtgtggagcccggccgctgctcgcgggctgagtgtctgtcgctgctgccgcctccacccagcctccgccatggacctcttcggggacctgccggagcccgagcgctcgccgcgcccggctgccgggaaagaagctcagaaaggacccctgctctttgatgacctccctccggccagcagtactgactcaggatcagggggacctttgctttttgatgatctcccacccgctagcagtggcgattcaggttctcttgccacatcaatatcccagatggtaaagactgaagggaaaggagcaaagagaaaaacctccgaggaagagaagaatggcagtgaagagcttgtggaaaagaaagtttgtaaagcctcttcggtgatctttggtctgaagggctatgtggctgagcggaagggtgagagggaggagatgcaggatgcccacgtcatcctgaacgacatcaccgaggagtgtaggcccccatcgtccctcattactcgggtttcatattttgctgtttttgatggacatggaggaattcgagcctcaaaatttgctgcacagaatttgcatcaaaacttaatcagaaaatttcctaaaggagatgtaatcagtgtagagaaaaccgtgaagagatgccttttggacactttcaagcatactgatgaagagttccttaaacaagcttccagccagaagcctgcctggaaagatgggtccactgccacgtgtgttctggctgtagacaacattctttatattgccaacctcggagatagtcgggcaatcttgtgtcgttataatgaggagagtcaaaaacatgcagccttaagcctcagcaaagagcataatccaactcagtatgaagagcggatgaggatacagaaggctggaggaaacgtcagggatgggcgtgttttgggcgtgctagaggtgtcacgctccattggggacgggcagtacaagcgctgcggtgtcacctctgtgcccgacatcagacgctgccagctgacccccaatgacaggttcattttgttggcctgtgatgggctcttcaaggtctttaccccagaagaagccgtgaacttcatcttgtcctgtctcgaggatgaaaagatccagacccgggaagggaagtccgcagccgacgcccgctacgaagcagcctgcaacaggctggccaacaaggcggtgcagcggggctcggccgacaacgtcactgtgatggtggtgcggatagggcactgaggggtggcgcgcggccaggagcacgcatggtattgacttaaaaggttcattttgtgtgtgtgcacattgtgtgttttgtgtactcctgtgggactcccatggttgtaaataaaggtttctctttttttttcctaaaaaaaaaaaaaaaaaaaaaaaaaaaaaaaaaaaaaa

SEQ ID NO: 69 - DNA, 2148 bp, Homo sapiens
agtgaagaatttggcgccatcttgagaaggtcaaagtgattcttcgattaaatgccttacttatcgcctagtgtgacctggcgcttgggtttactctccccagcaactgcgcctcaaacgcaaagaaaactgcaggtcctcggggaaggatcgatttcaccattcaagagaaaaatccatttcccagattcctcccctttatgtaaacgtctggtacctagtagacgttaaatacacgtgagttttccggttttataagatcacatactgcaaaccaacagtaaattacattaatacgcatttctttagaaattcttaattgctaggcactgacatataaattgagtttgctgttgttttagagagaaaaatagacatattcattttttttcaatcaggacatggtattcgtttccttcttaagcttcccatttttgaggtaggaaagtattggtgtgtgtctctatctctaccttgctccctcattagcaggcttaatgggcaggaattatgtctgttttgctttccgttggatccccgggtctagtagagcgccttgacacatagtaggtactcgacacagatgctggcttcatgatgaagcaattgtcctcgaattaatacaaaagggaagattcagactcagcgagccggtaccattcgtctagggacacacagccaggaaggaaccgaaccaggattctaacccaggattacccaagttcgaattctaattgaacataagtccttagcgaccttggacggacttactaaactgccctgaatctcggcttccttagctgcaaaatagggttaggaaaagtggactcggtgctcctctgcgccgcattcccgcagcgggatttgtgaaagcgaacttgagccccacactgcagaagccctgaggtcctgtctcaaccagaatccagcacccaggacaagccctccagcgacttcagaccttcccgctcccgaccccgcccgcccccgagaggcgtggtcaaggcggggccagaaggcggacgcgtgcacggagcggtaaagcgcaggcgcaaagcttcggtgacgtcagagaggcgcgctcccagctcggagccgactcgcagacgcgccccgcccctcggcgtcgctctggactggcgcaggcgcaagccggcaagatggcggcggctggggctttccgtctgaggcgggcggcatcggctctgctgctgcggagcccccgcctgcccgcccgggagctgtcggccccggcccgactctatcacaagaaggttgttgatcattatgaaaatcctagaaacgtggggtcccttgacaagacatctaaaaatgttggaactggactggtgggggctccagcatgtggtgacgtaatgaaattacagattcaagtggatgaaaaggggaagattgtggatgctaggtttaaaacatttggctgtggttccgcaattgcctccagctcattagccactgaatgggtgaaaggaaagacggtggaggaagccttgactatcaaaaacacagatatcgccaaggagctctgccttcctcccgtgaaactgcactgctccatgctggctgaagatgcaatcaaggccgccctggctgattacaaattgaaacaagaacccaaaaaaggagaggcagagaagaaatgagccctccctcggcgaagcctccagcaggccacaccagctgtttcccacctgctgtgcagtcaccttagatgttcagaagccgcttcctctccactgaagagctatgagatacgcacaatacttgctgttcacgttatgactctcatgcaagcaaaatacacagtttcattgttctgaatcctgtggtttctttcagcccacttttatcgccttaacctagttaatgtatattttgaattgtgtgtatgacctcagaactgaaattgataatgaagttgcaagttttgatagcccgtgaagtgcataagtatctaattttacctgaattgatttggggggaaattaccagtagaatgccttggtctgaatatttgatagaaccaattgttgtacataaaacagattgcgcatatatatatatgtataaaaaataataaaataatggaagatgatggtgttctctagtaaaaaaaaaaaaaaaaaa

SEQ ID NO: 70 - DNA, 7361 bp, Homo sapiens
acgtgatctgtcagttcgcggagagggaagaatatggccgccgggtgtggtgagggcgacgcgcttgcagtcgccgtctcttgcttccccgtcctctgacatcgcctgcagccgagcgggcccgttccgccggagctgaggaccaggtattcaaataaagttaattgcagctttctgtgaaaatgtcagttttgatatcacagagcgtcataaattatgtagaggaagaaaacattcctgctctgaaagctcttcttgaaaaatgcaaagatgtagatgagagaaatgagtgtggccagactccactgatgatagctgccgaacaaggcaatctggaaatagtgaaggaattaattaagaatggagctaactgcaatctggaagatttggataattggacagcacttatatctgcatcgaaagaagggcatgtgcacatcgtagaggaactactgaaatgtggggttaacttggagcaccgtgatatgggaggatggacagctcttatgtgggcatgttacaaaggccgtactgacgtagtagagttgcttctttctcatggtgccaatccaagtgtcactggtctgtacagtgtttacccaatcatttgggcagcagggagaggccatgcagatatagttcatcttttactgcaaaatggtgctaaagtcaactgctctgataagtatggaaccacccctttagtttgggctgcacgaaagggtcatttggaatgtgtgaaacatttattggccatgggagctgatgtggatcaagaaggagctaattcaatgactgcacttattgtggcagtgaaaggaggttacacacagtcagtaaaagaaattttgaagaggaatccaaatgtaaacttaacagataaagatggaaatacagctttgatgattgcatcaaaggagggacatacggagattgtgcaggatctgctcgacgctggaacatatgtgaacatacctgacaggagtggggatactgtgttgattggcgctgtcagaggtggtcatgttgaaattgttcgagcgcttctccaaaaatatgctgatatagacattagaggacaggataataaaactgctttgtattgggctgttgagaaaggaaatgcaacaatggtgagagatatcttacagtgcaatcctgacactgaaatatgcacaaaggatggtgaaacgccacttataaaggctaccaagatgagaaacattgaagtggtggagctgctgctagataaaggtgctaaagtgtctgctgtagataagaaaggagatactcccttgcatattgctattcgtggaaggagccggaaactggcagaactgcttttaagaaatcccaaagatgggcgattactttataggcccaacaaagcaggcgagactccttataatattgactgtagccatcagaagagtattttaactcaaatatttggagccagacacttgtctcctactgaaacagacggtgacatgcttggatatgatttatatagcagtgccctggcagatattctcagtgagcctaccatgcagccacccatttgtgtggggttatatgcacagtggggaagtgggaaatctttcttactcaagaaactagaagacgaaatgaaaaccttcgccggacaacagattgagcctctctttcagttctcatggctcatagtgtttcttaccctgctactttgtggagggcttggtttattgtttgccttcacggtccacccaaatcttggaatagcagtgtcactgagcttcttggctctcttatatatattctttattgtcatttactttggtggacgaagagaaggagagagttggaattgggcctgggtcctcagcactagattggcaagacatattggatatttggaactcctccttaaattgatgtttgtgaatccacctgagttgccagagcagactactaaagctttacctgtgaggtttttgtttacagattacaatagactgtccagtgtaggtggagaaacttctctggctgaaatgattgcaaccctctcggatgcttgtgaaagagagtttggctttttggcaaccaggctttttcgagtattcaagactgaagatactcagggtaaaaagaaatggaaaaaaacatgttgtctcccatcttttgtcatcttcctttttatcattggctgcattatatctggaattactcttctggctatatttagagttgacccaaagcatctgactgtaaatgctgtcctcatatcaatcgcatctgtagtgggattggcctttgtgttgaactgtcgtacatggtggcaagtgctggactcgctcctgaattcccaaagaaaacgcctccataatgcagcctccaaactgcacaaattgaaaagtgaaggattcatgaaagttcttaaatgtgaagtggaattgatggccaggatggcaaaaaccattgacagcttcactcagaatcagacaaggctggtggtcatcatcgatggattagatgcctgtgagcaggacaaagtccttcagatgctggacactgtccgagttctgttttcaaaaggcccgttcattgccatttttgcaagtgatccacatattatcataaaggcaattaaccagaacctcaatagtgtgcttcgggattcaaatataaatggccatgactacatgcgcaacatagtccacttgcctgtgttccttaatagtcgtggactaagcaatgcaagaaaatttctcgtaacttcagcaacaaatggagacgttccatgctcagatactacagggatacaggaagatgctgacagaagagtttcacagaacagccttggggagatgacaaaacttggtagcaagacagccctcaatagacgggacacttaccgaagaaggcagatgcagaggaccatcactcgccagatgtcctttgatcttacaaaactgctggttaccgaggactggttcagtgacatcagtccccagaccatgagaagattacttaatattgtttctgtgacaggacgattactgagagccaatcagattagtttcaactgggacaggcttgctagctggatcaaccttactgagcagtggccataccggacttcatggctcatattatatttggaagagactgaaggtattccagatcaaatgacattaaaaaccatctacgaaagaatatcaaagaatattccaacaactaaggatgttgagccacttcttgaaattgatggagatataagaaattttgaagtgtttttgtcttcaaggaccccagttcttgtggctcgagatgtaaaagtctttttgccatgcactgtaaacctagatcccaaactacgggaaattattgcagatgttcgtgctgccagagagcagatcagtattggaggactggcgtaccccccgctccctctacatgagggtcctcctagggcgccatcagggtacagccagcccccatccgtgtgctcttccacgtccttcaatgggcccttcgcaggtggagtggtgtcaccacagcctcacagcagctattacagcggcatgacgggccctcagcatcccttctacaacaggccattctttgccccatacctttacacgccaaggtattaccctggcggctcccaacatctcatctcacgtccatcagtaaaaacgagtttgcccagagatcagaacaatggcctagaagttatcaaggaggatgctgctgaggggctttcttcacccacagactcctcgagggggtcaggcccagccccaggcccagtggtattactgaattcactgaatgtggatgcagtatgtgagaagctgaaacaaatagaagggctggaccagagtatgctgcctcagtattgtaccacgatcaaaaaggcaaacataaatggccgtgtgttagctcagtgtaacattgatgagctgaagaaagagatgaatatgaattttggagactggcaccttttcagaagcacagtactagaaatgagaaacgcagaaagccacgtggtccctgaagacccacgtttcctcagtgagagcagcagtggcccagccccgcacggtgagcctgctcgccgcgcttcccacaacgagctgcctcacaccgagctctccagccagacgccctacacactcaacttcagcttcgaagagctgaacacgcttggcctggatgaaggtgcccctcgtcacagtaatctaagttggcagtcacaaactcgcagaaccccaagtctttcgagtctcaattcccaggattccagtattgaaatttcaaagcttactgataaggtgcaggccgagtatagagatgcctatagagaatacattgctcagatgtcccagttagaagggggccccgggtctacaaccattagtggcagatcttctccacatagcacatattacatgggtcagagttcatcagggggctctattcattcaaacctagagcaagaaaaggggaaggatagtgaaccaaagcccgatgatgggaggaagtcctttctaatgaagaggggagatgttatcgattattcatcatcaggggtttccaccaacgatgcttcccccctggatcctatcactgaagaagatgaaaaatcagatcagtcaggcagtaagcttctcccaggcaagaaatcttccgaaaggtcaagcctcttccagacagatttgaagcttaagggaagtgggctgcgctatcaaaaactcccaagtgacgaggatgaatctggcacagaagaatcagataacactccactgctcaaagatgacaaagacagaaaagccgaagggaaagtagagagagtgccgaagtctccagaacacagtgctgagccgatcagaaccttcattaaagccaaagagtatttatcggatgcgctccttgacaaaaaggattcatcggattcaggagtgagatccagtgaaagttctcccaatcactctctgcacaatgaagtggcggatgactcccagcttgaaaaggcaaatctcatagagctggaagatgacagtcacagcggaaagcggggaatcccacatagcctgagtggcctgcaagatccaattatagctcggatgtccatttgttcagaagacaagaaaagcccttccgaatgcagcttgatagccagcagccctgaagaaaactggcctgcatgccagaaagcctacaacctgaaccgaactcccagcaccgtgactctgaacaacaatagtgctccagccaacagagccaatcaaaatttcgatgagatggagggaattagggagacttctcaagtcattttgaggcctagttccagtcccaacccaaccactattcagaatgagaatctaaaaagcatgacacataagcgaagccaacgttcaagttacacaaggctctccaaagatcctccggagctccatgcagcagcctcttctgagagcacaggctttggagaagaaagagaaagcattctttgagaaaaacaagcaaaggagaagagtgttactgtacccttatgacagaattgtcctggattttgactccatccacgcccatcacctttctacattttgctgacagataactaaccgatgatgaggccgaggtaaaagagacatctgcagtgtgacagaagggagcatgagaagcatggctcaccagccagcctctgtggtctttgtaattagaagcttcagaactcactaatactactgtacctttcattggcgcattaccccataaaactttttgagacgaggtgagatctgagtataaagataggtcagaagtattttaaagggcttaatgtgccaaaaagaaaaaaagctagagaccctttttgcaaacatttggtgaccacacatttgagggaagacgtggcgttaggtgaagcagaagcaaaccctgctcttaggggctcacctaggtgagtgcacagcctgtgacgctacagggagaggctgagtaaaccgagatccagcgttctgtatggcaggggtattgcttatcacagaggttctgaagagtaggaagtacataatgaagagggctttaaaaattgccaacaaagtgagtcaccagggctggcagtagtgtgacggggctgtcctgagctgttaggagagtagatgcggggagggctggtgacctccgtgggtttatatgtcggaaactcttctctccaaatcccaggcctggcttccagcaccatccagctgtgcccaagaagccaccctggtctgttctccaactcttttaaatggtgcccaacttttctaagtgagcttagcaatgagaagaaaaaaaaacatgaattctttttctggaaaatcagggagacatgggtaataataggtactaataaatatttatagatgagtgaatgaggaaataattacatcaaaaaggtcagtgacaattgataaatgacaaggaaatatttaattaggtaaaactaaatcattgctctctatactaggatagactttatctacttcatctgttcctaagtcagcatgttagttctggggaaggatcataagaaaggaaatactttttaaaaaaaaatttggaaacatgtaacaaagcaagggtaaaatatatatatatatctatataagtgctgtgactgtaaaagtgtactttccattaattattagccgagttaagagaatggtcacattgaagtactgtgtggactagaaatgtaccctgtcatcatgcaatgaaatattgttatcgttttaacatagctcatttatgtagaatgaattctggtggtttaccccaagtcacagttaggacggtagatggtgagatcgcagatgcgctattatctagattcagtgttacattttcgatgtttatcactcagtgggtttttattaatatgctgattaagttatttactgggccagtcattgtgctaaatagttgctcttttgtgtttcattgccttgatgtttgagtgtaatctagcattttaatacagtgtttattttgcatgatctttaacaaatgttttaagcaattttaaaaaggcaggatgttattgacattatacactgaagtcttaacattttaacatttatagtgcttatttgcaaaattgtataattaggaattatttcagagacaatgttttctttttcaggtgagtagttgccgcgtaatatcattggagtacattctttatactgtttgtgaaattaatactagcatattaagtgtacaaatagatttagaaaacaataaaaaattgcatgctattctgactcatgaatttttattcactatgatgattcacattttgattaaaaataaaagtagtttgtgtgttt

SEQ ID NO: 71 - DNA, 1485 bp, Homo sapiens
tccggggcgggggcggggcctcactctgcgatataactcgggtcgcgcggctcgcgcaggccgccaccgtcgtccgcaaagcctgagtcctgtcctttctctctccccggacagcatgagcttcaccactcgctccaccttctccaccaactaccggtccctgggctctgtccaggcgcccagctacggcgcccggccggtcagcagcgcggccagcgtctatgcaggcgctgggggctctggttcccggatctccgtgtcccgctccaccagcttcaggggcggcatggggtccgggggcctggccaccgggatagccgggggtctggcaggaatgggaggcatccagaacgagaaggagaccatgcaaagcctgaacgaccgcctggcctcttacctggacagagtgaggagcctggagaccgagaaccggaggctggagagcaaaatccgggagcacttggagaagaagggaccccaggtcagagactggagccattacttcaagatcatcgaggacctgagggctcagatcttcgcaaatactgtggacaatgcccgcatcgttctgcagattgacaatgcccgtcttgctgctgatgactttagagtcaagtatgagacagagctggccatgcgccagtctgtggagaacgacatccatgggctccgcaaggtcattgatgacaccaatatcacacgactgcagctggagacagagatcgaggctctcaaggaggagctgctcttcatgaagaagaaccacgaagaggaagtaaaaggcctacaagcccagattgccagctctgggttgaccgtggaggtagatgcccccaaatctcaggacctcgccaagatcatggcagacatccgggcccaatatgacgagctggctcggaagaaccgagaggagctagacaagtactggtctcagcagattgaggagagcaccacagtggtcaccacacagtctgctgaggttggagctgctgagacgacgctcacagagctgagacgtacagtccagtccttggagatcgacctggactccatgagaaatctgaaggccagcttggagaacagcctgagggaggtggaggcccgctacgccctacagatggagcagctcaacgggatcctgctgcaccttgagtcagagctggcacagacccgggcagagggacagcgccaggcccaggagtatgaggccctgctgaacatcaaggtcaagctggaggctgagatcgccacctaccgccgcctgctggaagatggcgaggactttaatcttggtgatgccttggacagcagcaactccatgcaaaccatccaaaagaccaccacccgccggatagtggatggcaaagtggtgtctgagaccaatgacaccaaagttctgaggcattaagccagcagaagcagggtaccctttggggagcaggaggccaataaaaagttcagagttcaaaaaaaaaaaaaaaaaaa

SEQ ID NO: 72 - DNA, 3842 bp, Homo sapiens
ctttaaatgctgcccagggccgacgcggcacggccctcgccacttttcttggtcgggcagcggcagcggcagcggcagcaagcagccccgtcggcccgggtccggggccgttctgggccgcggcaagcaccttcgccctcccagctcgcgctgcctccctcccctcccctcctcccaggctctgcctgccaggtcggcgccgggccccgggcgcgcgcgcgcgcgccccctcgtgtgtgcgcgcgcccgccgccagctcggacccgcgcccccgcccccgccccgcgcaggacagccccgggatccccgcccgcgcgccgcgtcccacgtaccccgccgcgccgggcaagaagatggcgggatcagtggccgacagcgatgccgtggtgaaactagatgatggccatttaaacaactctttgagctctccagttcaagcggacgtgtacttcccacgactgatagttccattttgtgggcacattaaaggtggcatgagaccaggcaagaaggtgttagtgatgggcatcgtagacctcaacccagagagctttgcaatcagcttgacctgtggggactcagaagaccctcctgccgatgtggcaatcgaactcaaagctgtgttcacagatcggcagctactcagaaattcttgtatatctggggagaggggtgaagaacagtcagcaatcccttactttccattcattccagaccagccattcagggtggaaattctttgtgagcacccacgtttccgagtgtttgtggatggacaccaactttttgatttttaccatcgcattcaaacgttatctgcaattgacaccataaagataaatggagacctccagatcaccaagcttggctgatttaaaccacctctatttcaaataggatcacgtgccacaactatctgactgttggtctggaagaagtgtcctagcaagatctggagacttaaaaagaaaacaaaaacaaatggcaagtttcacttaagggtggtttgcccttaagaagaaagctgttgggacaaagacaccgagccattatacccagaataaaataatacatttatgctggattttattcagaccaaactaaaatggatttgtgatgatttgtgatttggtagcaaattattcatcttttcaaagcaaggcaatgcttagaaacagaagtgctaaagacacttaaaaagccaacaacaacggtacagtgaaatcaatgcatttctgcactaaagtggaattgtgtagcacaaccaatattttagtcagggtatttacatagaatgtaggttgttcaaggtttgactttttttttgttttttgtttttgtttttgtttttgttttgcacagcataatgttaattcagattgttgaagctttcttgtagttatttatttatactcaatgtatgtattaaagaatgaacaatgtctcaagaacagcaagttgtaaacttttgaatgtataaatatcttaggtccaaggggagaaaattacatattacaattatgaaacaggtgaatttctgctttaaagaattgagattctccatacccctaaacttaggatctcttgatataaactgctgtaagtgcttttgggaaacctttgcaaaaccattttgataaaactgctttccaagttattgttggttatgtaaaattctatttacattgctttttctccttactgggaattagcacattattggcttccttaagactaattatttctctcttgatttatataatagctcattaagttgttattaatcaaaaacacaaagaggtgattgcttagacaatttttaaagtgactatagtataaacttttaaaagaataatatgaaaatgactgtggaatgcagtgtaaagcagaagcaaacggccctgaataacttacttggaagtaatttatatcaacttaagctgttagctcattgtataacttttcttatgtgaccctcaccaatatccctaagtaatgcctttggaagcttcagagtagaagatgcttcctactgtgttggctctgaggagatagtaggattagataggatccagattaggaaatgatccagttagtttatctgaaaggttaactcccaggactccaggtctttgaatccagccagtagagtgaatgcttccaattaagctgtaggtgttaccctgcacttacggaactgatcaaacaggtgactccaacaggaggttgcagtactgtaaacgtcaccgcaaggcaagggatgcttaaagtcctgggttctggactttaaaagctacattggccctggagggagggacccttggcattgctttgatcaggtagtgagggaagacagggttctggggtgggggtgtatttatatataatttaggttttgtttgtacagcatactgtgtcttgtaatgacacatccttgtcctgctttccttttttgagttttttttttttttttacacaacatgcagaggcactgaagtgaccatgtcattttcaagtgtcaagaatgtagacagtgtttcagtaccaaagtctaaaataaactaaaattatgaattttttataggtgatacatttggattcttctcaactttgaaactgtttagcacagttccattgtattatataagaagacactgtatccaacaagactggctgtacattgaaaagctttatgtaccagccaacttatttaaccatattcagcctgttccgtgggggctgttctgtggttccaggtattttcaagcctgtgattaacttctcatggcttgtcacttaaaagtccctaaatttgagagacttaaagggcaccttgaaatacatttgtggagttttgatccaacttatggtggaagagccccataggaagactgttttgagtggccaaccattcccacccactgcataattcagcagaaactagaggagcagggcgtgtactgattggaattgacacgcttattctgtctacctatcagctaactcattagcagccaagcccttaggcagcttagtgtgaaaatacaatgttaactgtttgtttctctgtgaggttagtgggaaccgcttggataagcctattgggattaatctaaatgatgtgatgatttgattcaggtatagcccaaattagtaaggggctttagctgtaaactgaaaacaatattcacaccctctcctgggcctgtaaggtctaaggtgagaatttcaggatggaaaatgcaatgtaaagcttccacaggaaagtattcgggtatgtaaggtgttatttctgaccagagccctagttctgcaataaccaaaaccaaggagtataaataacaatcaggctctgggggaatagaaagcaggctttagacaatctgtccatttctacagtaaaattggagtgagtgtgtatatctacttaaaacttaatagaagtgacttctactttttgggctattccagaagtattttaaaattattatttaaaattttgaagccccatttcaaatcttgccgaccttagttcaaagccccctgagagatcacttttagaattgaggatttgttaaaatggcaagtcatttcatttgtgttaaaaagaaaatacccaaaaggaaggagggagccctgtttgccttgagataaacggccttggcattttctggcattaatgtagaaataatgttcctatgatgacatattttcaaagaaacactttcttatttactgtgtggtgtaaaatgttgctaaatgtgttgttacattatgtcactgctgaaagtaatttgcactataataaaggaattttctacaaaacaaaaaaaaaaaaaaaa

SEQ ID NO: 73 - DNA, 3994 bp, Homo sapiens
gcccgctccagccgccgcgcatcctcggcccgcgccccgagacccgcgcccagctagccccggccccgctcggcgccccaggcagctcggctgcgctcgccgcgggacggcgcggccatgaggctgcggggatgcggaccccgggccgcccctgcctccagcgcaggggccagcgacgctcggctgctggcgcccccggggcggaaccccttcgtgcacgagctgcgcctcagcgccctgcagaaggcccaggtggccctcatgacactgacgctcttcccggtccggctcctggttgccgctgccatgatgctgctggcctggcccctcgcacttgtcgcatccctgggctctgcggagaaggaacccgagcagcccccggccctgtggaggaaggttgtggacttcctgctgaaggccatcatgcgcaccatgtggttcgccggcggcttccaccgggtggccgtgaaggggcggcaggcgctgcccaccgaggcggccatcctcacgctcgcgcctcactcgtcctacttcgacgccatccctgtgaccatgacgatgtcctccatcgtgatgaaggcagagagcagagacatcccgatctggggaactctgatccagtatatacggcctgtgttcgtgtcccggtcagaccaggattctcgcaggaaaacagtagaagaaatcaagagacgggcgcagtccaacggaaagtggccacagataatgatttttccagaaggaacttgtacaaacaggacctgcctaattaccttcaaacctggtgcattcatccctggagcgcccgtccagcctgtggttttacgatatccaaataaactggacaccatcacatggacgtggcaaggacctggagcgctggaaatcctgtggctcacgctgtgtcagtttcacaaccaagtggaaatcgagttccttcctgtgtacagcccttctgaggaggagaagaggaaccccgcgctgtatgccagcaacgtgcggcgagtcatggccgaggccttgggtgtctccgtgactgactacacgttcgaggactgccagctggccctggcggaaggacagctccgtctccccgctgacacttgccttttagaatttgccaggctcgtgcggggcctcgggctaaaaccagaaaagcttgaaaaagatctggacagatactcagaaagagccaggatgaagggaggagagaagataggtattgcggagtttgccgcctccctggaagtccccgtttctgacttgctggaagacatgttttcactgttcgacgagagcggcagcggcgaggtggacctgcgagagtgtgtggttgccctgtctgtcgtctgccggccggcccggaccctggacaccatccagctggctttcaagatgtacggagcgcaagaggacggcagcgtcggcgaaggtgacctgtcctgcatcctcaagacggccctgggggtggcagagctcaccgtgaccgacctattccgagccattgaccaagaggagaaggggaagatcacattcgctgacttccacaggtttgcagaaatgtaccctgccttcgcagaggaatacctgtacccggatcagacacatttcgaaagctgtgcagagacctcacctgcgccaatcccaaacggcttctgtgccgatttcagcccggaaaactcagacgctgggcggaagcctgttcgcaagaagctggattaggacccagggttgcggagagacgcggcccctcccgcgtggacatcaccgccatgagcctctttgcgagtgacctctgggctccgctcctcactcctgctgtacaggcactgtcttcagcccgagttccaggggcctcgggggctgtttgtatcttgttcctttgtgaagtgtgttgcagaaccgacgcttactgtgcgagaatcggagggcgcgcacgcggatcccccgcctggcctggaccccgtggggtcaggttccctgccgggcggggggcaccggtgccgccccgtgttctcccacggggccctggtttcgagtctctgtcacagcctcttccggcggcagcgtgcaccgggcgggcctccgtgcacactcagcacacgcctgccacacagcgtgcgcttgcgtgtcactctggcacgaaacctgtctgcctctgtggatccacagcctggcagagccgagccgtcacctgatttttcagtgtttctacctgtgtgctggagctcatgagtattttataaactccatttaggtacttcaggaaacatgcagcattttttaaaaaatgaaaattgtttttctacttcatttttccttttagagtcaaaggatatttatttataggcctttttttttttaatatagaatctgaggctgtttgggctttgacttaaatttccatcaggcctctctccagcaggtaatccctctccttccgctgggtcccctggggaggtgtgaactcaagggcctagccccaaaacactttttctgcttttcttaatccttttccagtcccctctttttttataaacgttggcagtttgatgtttctgtttcggcataacgtaatccatttcactgtagcctaaactccagtccgaggttggatattgttcaaatgagcagggcccgagctggaagcgcaaggcagccgccgccgtgccgctcctcccttgccctcaggccaggtccctgctggaagcggctgcatcttcctgtcagccctggtttccatggtgactggcgtcacgcagccacccgagtatggctgaccttcctgcagagagaggagccgcagtcttttgcttgtggaaggagacgctgggctgtgcggtgcggagggtgatgaggatgtctggtgacagccgtgcggacaccactcctctctgcagcactgcctcccagcgccagggtcgcgggcacatcccactgagagcgggggtcctgccccatcttagagtcaaaggcagaggggcttccaggccctggatggggtattttggtgtcacctgaagtccctctgacatcaccttgtttcatcattttttatgacagaattagaaacccatccttcaagcacaataatcatcacagacttgagtttgcttcctaaagcaaaggctccgggtttgtttggaaaatttttttgatttctgaaatgaattgatttttatatttggggcatctctatagaaagtgaccaccaaggccagtaagtacgggaaaaaatgtttactaacttcctcagagattcgtgatacgcgtttctccactgacagacatttaaaaacaaccttcagctccgtttcaatcaatcacctcgacttgttttttagcatggacactgccagcaggacagacagggatggagtaaaccgaagtcaatttcagggctcttggcgtgttggacacagaagaaatcctagtgcagcctttggtagctaacagtcactgattttataattggagaatgcgtaaagattcatttttcaaggagaagagcctgcaaatggccaatgaaggaggtaaataaactaagatattccgagggaagggacccaggccacctcccttccgcaggtctgcagatgaagggttttttgaatgaaatgccactgtgcattttcagaaaaaaaaatctctgataaacagactttgaatggatgtttgttcctcctgattctcttttctcttcgtggcgacttagagttggcggatattcggaactgtgaatgtacatagcgttgagttaaaccccttgtgtgtgagacaggacgcagcgggcccctggtggcctgggggccagacccgtgggcaggtggggcatgggccctggcctgcggggacctgctggggtgtgagggcagagggagggttgccatgaaggaacttgggattttcaatggaataagtaaaacataaagtctatacttgggaaaaaaaaaaaaaaaaaaaaaaaaaaaaaaaaaaaaaaaaaaaaaaaaaa

SEQ ID NO: 74 - DNA, 1361 bp, Homo sapiens
gtctcctccctttggtccgctgcaggttggtggcgggaggaggggacagctgcgggcgcggggagggggcgccgcgccgcgggggccatggcggagccaggaagccgggagtccgagacccgggcccgcagcccgagtgtcgccgccatggcttcgccgcagctctgccgcgcgctggtgtcggcgcaatgggtggcggaggcgctgcgggccccgcgcgctgggcagcctctgcagctgctggacgcctcctggtacctgccgaagctggggcgcgacgcgcgacgcgagttcgaggagcgccacatcccgggcgccgctttcttcgacatcgaccagtgcagcgaccgcacctcgccctacgaccacatgctgcccggggccgagcatttcgcggagtacgcaggccgcctgggcgtgggcgcggccacccacgtcgtgatctacgacgccagcgaccagggcctctactccgccccgcgcgtctggtggatgttccgcgccttcggccaccacgccgtgtcactgcttgatggcggcctccgccactggctgcgccagaacctcccgctcagctccggcaagagccaacctgctcccgccgagttccgcgctcagctcgaccccgccttcatcaagacctacgaggacatcaaggagaacctggaatcccggcgcttccaggtggtggactcccgagccactggcaggttccgcggcaccgagcccgagccccgagacggcattgaacctggccacatcccaggtaccgtgaacatccccttcacagacttcctgagccaggaggggctggagaagagccctgaggagatccgccatctgttccaggagaagaaagtggacctgtctaagccactggtggccacgtgtggctctggcgtcacagcctgccacgtggcactaggggcctacctctgcggcaagccagacgtgcccatctacgatggctcctgggtggagtggtacatgcgcgcccggcccgaggatgtcatctcagagggccgggggaagacccactgaagctgggcaggacacaggcgagctcaggtgatgccggccaccagcaatgcctggcctggtagctccgcttctgctttcaccaagagagtgtttcttcactcaactcaggtggcatttggggtgacatctcaaaggccaggaattccgttgacttgttggctgccagtaggggcgggaggaaaggcggaggcgagccctggaggagggaggccacaactccgagctgcccacctggtgctgagctggggccccgcctcctttctgttttatttttgaggaaataaaataaccaagtgctaaatcttgtaaaaaaaaaaaaa

SEQ ID NO: 75 - DNA, 2068 bp, Homo sapiens
caaaggccggagatggtgtcgtccccggcctccgattggtcgggggggcgggggcgtggcctctggagcctggttccgcgcgccggagcgcgctagccgcattgcgagccgaacccgggagctggcgccatggtgctgttgcacgtgctgtttgagcacgcggtcggctacgcgctgctggcgctgaaggaagtggaggagatcagtctgctgcagccgcaggtggaggagtctgtgctcaacctgggcaaattccacagcatcgttcgtctggtggccttttgtccctttgcctcatcccaggttgccttggaaaatgccaacgccgtgtctgaaggggttgttcatgaggacctccgcctgctcttggagacccacctgccgtccaaaaagaagaaagtactcttgggagttggggatcccaagattggtgccgcaatacaggaggagttagggtacaactgccagactggaggagtcatagctgagatcctgcgaggagttcgtctgcacttccacaatctggtgaagggtctgaccgatctgtcagcttgtaaagcacagctggggctgggacacagctattcccgtgccaaagttaagtttaatgtgaaccgggtggacaatatgatcatccagtccattagcctcctggaccagctggataaggacatcaataccttctctatgcgtgtcagggagtggtacgggtatcactttccggagctggtgaagatcatcaacgacaatgccacatactgccgtcttgcccagtttattggaaaccgaagggaactgaatgaggacaagctggagaagctggaggagctgacaatggatggggccaaggctaaggctattctggatgcctcacggtcctccatgggcatggacatatctgccattgacttgataaacatcgagagcttctccagtcgtgtggtgtctttatctgaataccgccagagcctacacacttacctgcgctccaagatgagccaagtagcccccagcctgtcagccctaattggggaagcggtaggtgcacgtctcatcgcacatgctggcagcctcaccaacctggccaagtatccagcatccacagtgcagatccttggggctgaaaaggccctgttcagagccctgaagacaaggggtaacactccaaaatatggactcattttccactccaccttcattggccgagcagctgccaagaacaaaggccgcatctcccgatacctggcaaacaaatgcagtattgcctcacgaatcgattgcttctctgaggtgcccacgagtgtattcggggagaagcttcgagaacaagttgaagagcgactgtccttctatgagactggagagataccacgaaagaatctggatgtcatgaaggaagcaatggttcaggcagaggaagcggctgctgagattactaggaagctggagaaacaggagaagaaacgcttaaagaaggaaaagaaacggctggctgcacttgccctcgcgtcttcagaaaacagcagtagtactccagaggagtgtgaggagatgagtgaaaaacccaaaaagaagaaaaagcaaaagccccaggaggttcctcaggagaatggaatggaagacccatctatctctttctccaaacccaagaaaaagaaatctttttccaaggaggagttgatgagtagcgatcttgaagagaccgctggcagcaccagtattcccaagaggaagaagtctacacccaaggaggaaacagttaatgaccctgaggaggcaggccacagaagtggctccaagaaaaagaggaaattctccaaagaggagccggtcagcagtgggcctgaagaggcggttggcaagagcagctccaagaagaagaaaaagttccataaagcatcccaggaagattagaatgcaaatggacattctctgggaggtggggcataccatagcccaaggtgacatttcccaccctgtgccgtgttccccaataaaaacaaattcacaagaaaaaaaaaaaaaaaaaaaaaaaaaaaaaaaaaaaaaaaaaaaaaaaaaaaaaaaa

SEQ ID NO: 76 - DNA, 1979 bp, Homo sapiens
gcagcgtgttctgattctttgcgggacggcgagcgcatttgtgctttgcccgccgcggcctaggaggccttttgaggccgcgtagtcggtgtttttgaactgactctacagcttctggcaggccgtgcggcgccctgacccggcctcaccatgttggtgctgtttgaaacgtctgtgggttacgccatctttaaggttctaaatgagaagaaacttcaagaggttgatagtttatggaaagaatttgaaactccagagaaagcaaacaaaatagtaaagctaaaacattttgagaaatttcaggatacagcagaagcattagcagcattcacagctctgatggagggcaaaatcaataagcagctgaaaaaagttctgaagaaaatagtaaaagaagcccatgaaccgctggcagtagctgatgctaaactaggaggggtcataaaggaaaagctgaatctcagttgtatccatagtcctgttgttaatgaacttatgagaggaattcgttcacaaatggatggattaatccctggggtagaaccacgtgaaatggcagctatgtgtcttggattggctcacagcctgtctcgatatagattgaagtttagcgctgataaagtagacacaatgattgttcaggcaatttccttgttagatgacttggataaagaactaaacaactacattatgcgatgtagagaatggtatggctggcatttccctgaattaggaaaaattatttcagataatttaacatactgcaagtgtttacagaaagttggcgataggaagaactatgcctctgccaagctttctgagttgctgccagaagaagttgaagcagaagtgaaagcagctgcagagatatcaatgggaacagaggtttcagaagaagatatttgcaatattctgcatctttgcacccaggtgattgaaatctctgaatatcgaacccagctctatgaatatctacaaaatcgaatgatggccattgcacccaatgttacagtcatggttggggaattagttggagcacggcttattgctcatgcaggttctcttttaaatttggccaagcatgcagcttctaccgttcagattcttggagctgaaaaggcacttttcagagccctcaaatctagacgggatacccctaagtatggtctcatttatcatgcttcactcgtgggccagacaagtcccaaacacaaaggaaagatttctcgaatgctggcagccaaaaccgttttggctatccgttatgatgcttttggtgaggattcaagttctgcaatgggagttgagaacagagccaaattagaggccaggttgagaactttggaagacagagggataagaaaaataagtggaacaggaaaagcattagcaaaaacagaaaaatatgaacacaaaagtgaagtgaagacttacgatccttctggtgactccacacttccaacctgttctaaaaaacgcaaaatagaacaggtagataaagaggatgaaattactgaaaagaaagccaaaaaagccaagattaaagttaaagttgaagaagaggaagaagaaaaagtggcagaagaagaagaaacatctgtgaagaagaagaagaaaaggggtaaaaagaaacacattaaggaagaaccactttctgaggaagaaccatgtaccagcacagcaattgctagtccagagaaaaagaagaaaaagaaaaaaaagagagagaacgaggattaacagaaaggaattacgattatatcacccggacacacatcatgcttaagattcaactgggagcataccagggatgctctctaacgtaatcaagggaaggttcagtaagacaaagtgatttatcatctataacttcaaacctatttgtcttgacatcaactctgttaaccttatgtcatcatttcttagagtctttgatatacaaataaaattttctttgtattttaaaaaaaaaaaaaaaa

SEQ ID NO: 77 - DNA, 2026 bp, Homo sapiens
caatcccccctccccccccaatctgtctttctagcatgttgccctttttcaaccacatttgtgtttcaggtgtagagaggagagagagtgaacagggagcggggcttttgtctgttggtctccctggactgaagagagggagaatagaagcccaagactaagattctcaaaatggtttattacccagaactctttgtctgggtcagtcaagaaccatttccaaacaaggacatggagggaaggcttcctaagggaagacttcctgtcccaaaggaagtgaaccgcaagaagaacgatgagacaaacgctgcctccctgactccactgggcagcagtgaactccgctccccaagaatcagttacctccactttttttaatcgtaacacctccatttgtattacatatggtgtatgggtattgatgaggtcatggtatcatatatgggatttttttctgtgtaaatcatcaagtataagaagaaactatgggactctgagccttgctttagagaatttacagtggacaaataggtgtcatcaaaccagtttttaatcattctgactcaagtgaaaacgctcagaatttcacactgtgaatccacgtttacaacccttacaggtgggccttcaggcctggttcgctacaacaatgtcttccacaactcaaactcccaccgcgctcacacaaccggtccactcctgccttttcactcacacagctcccgactgcttcttgcagaggctgagagtcccccccccaccttttttttcatttagatgtaacaaacctagtagtttatgttcatcaattgtctgtatatctctatattttatccatgtactcttttgatgtatagaagtagtttgaaactcattgtttccttgtggtaagtgaccgagatgctgccacaggacctgagacactgatgaatggtgctattttggactttcaacatgctccttggcgaggtagctctgatggagttattttttatttccatgttctaagaaggtgttggtactctgtttccctgaatgttgttctctagactggattgacttgttttccttgtgtcttcagtgtggctttcttcctcagtgttgtaggttgagcgaatgctaccagagtgtgagagaccattgtctcgttggctggcgctcacggacatgcagtcacggtagcgggagcaatcacaaaactgtaatttacttaccaaatctcttcctttccgtagcctcgcctgcctgacttagagaaagaaaagcaataattttacaggcattttgaggtgtctctttgggttctttctgtttgaaaggatatttgtcgaaaaaaagagcaaaaccgttttaaataaactccccctggaaaaaaacccaaaacactggcatctgagtgggaatatgaaaatgacaccttttccaaatattaaattggaaaacaaggtctacaaaatcatgatacttttttaaaaggcagagcattcttttttcggcaattttgataagcaaggtgtagatttacatttttgtccttgctcccaacgaaatggataaacaaaaataaattaccatctactcatggaatgttgttgtgttagccagtctgaaagcccaccttaatttttatataactgtctttagctcttcttttgacagggcaggccttgttctgaactgtttcgcttctgactgttaaacaccgatgacgcatgcactgcacttcttcgttttcttcttgctcccccattggcctgagtttcttgtgcattactcctctccctccttcgttagaataggtatatcagctgtgtaaatagagcaagaaaacagtattctgcatctgtggcatttatgtagagttgcagttgtgtactgctgaaaatgcaggcttttgtaacagtgtgatctttactgatgcactcatgacaagtacccaatgtattttagctattttagtagtatttgttcaataaatacgcaagctgtaaggtaaaaaaaaaaaaaaaaaaaaaaaaaaaaaaaa

SEQ ID NO: 78 - DNA, 3589 bp, Homo sapiens
gagtgtccgccgcctccgccgggcggcccaccgagctgtgcacgcgtccgtgcaagcccccgggacccggcgccatgtagcgccccgccgattggaggctgccccgccgcgggaaatgaagggacgcggctgctgggacacggcctccgtgcgctccttctgcagctccggctgcctgaataaatttaagaaggatgactctggggacgacgacgaggctaccaccccagccgacaagagcgagctgcaccacaccctgaagaatctttccctgaagttagatgacctcagcacgtgcaatgacctcatcgccaagcacggcgctgcactccagcgctccctgacagagctggacggcctcaagatcccatctgagagtggggagaagctgaaggtggtgaatgagcgggccaccctcttccgcatcacatccaatgctatgatcaacgcctgcagggacttcttggaactagcagagatacacagtcggaaatggcagcgggcactgcagtatgagcaggagcagcgcgtgcacttggaggaaaccattgagcagctggcgaagcagcacaacagcctcgagcgggccttccacagtgcccctggccggccggccaacccctccaagagcttcattgagggaagcctcttgactcccaaaggagaggacagtgaggaagatgaagataccgagtactttgatgccatggaagactccacatccttcatcaccgtgatcaccgaggccaaggaagacagcagaaaagctgaaggtagcaccgggacaagttccgtggactggagctcagcagacaatgtactagatggtgcctcgctcgtgcccaagggttcatccaaagtcaagaggcgagtccgcattcccaacaagcccaactacagccttaacctctggagcatcatgaagaactgcatcggccgggagctctccaggatccccatgccggtgaacttcaatgagcccctgtccatgctccagcggctgacagaggacctggagtaccaccacctgctggacaaggcagtgcactgcaccagctcagtggagcagatgtgcctggtggccgccttctctgtgtcctcctactccaccacagtgcaccgcatcgccaagcccttcaaccccatgctgggggagaccttcgagctggaccgcctcgacgacatgggcctgcgctccctctgtgagcaggtgagccaccaccccccctcagctgcgcactacgtgttctccaagcatggctggagcctctggcaggagatcaccatctccagcaagttccggggaaaatacatctccatcatgccgctaggtgccatccacttagaattccaggccagtgggaatcactacgtgtggaggaagagcacctcaactgttcacaacatcatcgtgggcaagctctggatcgaccagtcaggggacatcgagattgtgaaccataagaccaatgaccggtgccagctgaagttcctgccctacagctacttctccaaagaggcagcccggaaggtgacaggagtggtgagtgacagccagggcaaggcccattacgtgctgtccggctcgtgggatgaacaaatggagtgctccaaggtcatgcatagcagtcccagcagccccagctctgacgggaagcagaagacagtgtaccagaccctgtcagccaagctgctgtggaagaagtacccgctgccggagaacgcggagaacatgtactacttctcagagctggccctgaccctcaacgagcacgaggagggcgtagcgccaaccgacagccgcctgcggcccgaccagcggctgatggagaagggccgttgggacgaggccaataccgagaagcagcggctggaggagaagcagcgcctgtcgcggcgccggcggctggaggcctgcgggccgggcagcagctgcagctcggaggaagcagagaaggaggcggatgcctacacgccactgtggtttgagaagaggctggatccgctgaccggggagatggcctgtgtgtacaagggcggctactgggaggccaaggagaagcaagactggcatatgtgccccaacatcttctgagcgccacccttgcaacaaatacaggcgcctgcacagcctggcccacctgttcattaatgcactcaatttagtactgaatggtctttctcccagcccattcccagcccttcctatttcctttcctattttttttttctccccacactttcttgggactcccaccttggaaggaggaagggctgacctgggttctctccagcccccaggtgcgccgggtcacccgtgccccttcattatggacctgggccctaccggaacccctgccccagttaccacaactcaggccggctggcccgggccatgggctgcgcaaatcaccagcccccaacccagggaggaactggcccctcctagggagcctcttcgacttttttagaaaaatgatctccatttctttccagccatgatgtttagtaaatatttttagtaccgcacttagcagacagctttccaagtgtgctttcttgccacaaaagtgtcctggcaagagccccttatttttaagacatcaggaagccagaccgctttgagttgggagaattttgtagctcaacatatcaagtcctcgatggtatctgagctgcccacacccccacctgccaaggccccacagagcccaaaacagaagggggctgccccagcccagcagagcacagagtttctggagctcccatccacagatgcaggagggggtactgatggtaacccccatgtggatttgagggcagcagtccctggcctcaccctagccagcctgggtggctccctagccccaagaggccaggaagggctggaaggcagggcctgcaggtgctccccgccctgagacccaggccccaaatcagcaataatgaacaaacccttggcccagcctgggctggtgacctgggcaccagagaccttgcatccctcctcatcctaggaggcccctaggggtgccccatctcagtgtcccctgaactctttatttgcctaatttatatatatatatatgagatatataaatatatataaaatagctattttgcttaaatttctacagtatgtaaaagtgaaaaaatgatgaagacgggtgcacctgtctgagtttggccctcatgtgagctgtgcccttccctctcctcatgcccccttccagcggcttctgccaaccatggggggctggaccaccatggccactgacccagcccctcagaatcccacactccaatcctttccatttcagtttagtcctaaaagttcatcacagggtctttctttctactccaggactggttttgtttttatatatataaaaaaaaaaagtgaaaacaccaatgtgtgaaatgccttacaatgcccactggagaggcggggcggggtggggcaggatggccccactggggctcctacagagctgtggaatgtacctctccccaacactgttttgttagcgagcaccttttgaccagtaataaaaaaccttggctttggagttttccactgaaaaaaaaa

SEQ ID NO: 79 - DNA, 2426 bp, Homo sapiens
gtgacgctacaggggccagctatgctcccgggagtgttgatgttttccagtcattccggctgacagcgttcaagttggaatcctggaggggaggtgtttttcctgtcgtacgtgggacaggccacgctgtccgtccgcagtaccgacgcctgcagcaggagcattggtttgaaaaggccctacgagacaagaagggcttcatcatcaagcagatgaaggaggatggcgcctgtctcttccgggctgtagctgaccaggtgtatggagaccaggacatgcatgaggttgtgcgaaagcattgcatggactatctgatgaagaatgccgactacttctccaactatgtcacagaggactttaccacctacattaacaggaagcggaaaaacaattgccatggcaaccacattgagatgcaggccatggcagagatgtacaaccgtcctgtggaggtgtaccagtacagcacagaacccatcaacacattccatgggatacatcaaaacgaggacgaacccattcgtgttagctaccatcggaatatccactataattcagtggtgaatcctaacaaggccaccattggtgtggggctgggcctgccatcattcaaaccagggtttgcagagcagtctctgatgaagaatgccataaaaacatcggaggagtcatggattgaacagcagatgctagaagacaagaaacgggccacagactgggaggccacaaatgaagccatcgaggagcaggtggctcgggaatcctacctgcagtggttgcgggatcaggagaaacaggctcgccaggtccgaggccccagccagccccggaaagccagcgccacatgcagttcggccacagcagcagcctccagtggcctggaggagtggactagccggtccccgcggcagcggagttcagcctcgtcacctgagcaccctgagctgcatgctgaattgggcatgaagcccccttccccaggcactgttttagctcttgccaaacctccttcgccctgtgcgccaggtacaagcagtcagttctcggcaggggccgaccgggcaacttccccccttgtgtccctctaccctgctttggagtgccgggccctcattcagcagatgtccccctctgcctttggtctgaatgactgggatgatgatgagatcctagcttcggtgctggcagtgtcccaacaggaatacctagacagtatgaagaaaaacaaagtgcacagagacccgcccccagacaagagttgatggagacccagggattggacaccatctcccaaccccagtactcctgctctccggtgccacctcaccttctttggcttcttccctcttgcctccttctgttctttctgctctcccctcttttccctcctcctcacttccctctggctagcccacccctgcactctctctcattgccgctgccactatcacctgtctctctgccagctgatgtgccctgttgccccccaccccatcccgcacagaaccatccctgcattccacaggggactcgggcaagggtgccgaagatagacaagaggcacacagagacagaccaactggcagccaggcagccccagaggagagagacattcagacagaggaaagtctccctgcccctcattccttccaagatgagaaaaacttgccgccaccccccgacactgatgccagggaggtgggaggaagaagtgggaaatttcccttcccagtacccccaagaacgtctgagccttcaatgttgaattttttctttattaaaattacttttatcttataaaatcaactaatcaaaaatgatatagacgacagcactggctctgtgaaggtggcatctttctgggcaggcaggccatggggcatggaggagggtgcaaagatatgggttgctgtcttctggcctccagctgcatggaggccggcccagggtctagggtgtgcactgggcaagggcagggcggcaggtgtcaggccggcttggacaatgaaaccctgaccttgctgcattccttttgcttccaccaccactagcttctttggaatcttggggtgggggtcatctttggggattatggctgccacccgggatttgagtgtagggagtgtgggagcagccttggcagatggggcacccgtgccctgcaggtgttgacaagatccgccatctgtaatgtccttggcacaataaaaccaaatgtcagtttccctgagcgactctgttctgtgtggggcaggggttgggcgggcctctgggcagaggatgcaatggcacggaccttggcttgacctcagaggtgtgaatgctctccagcagggtctgtctgggggcctggagtttgtatttgatttgctgcttattaaacctccttctggacctattgccactggaaaaaaaaaaaaaaaaaa

SEQ ID NO: 80 - DNA, 7177 bp, Homo sapiens
ttctctcacccaggatcacttccgaaaccacttcgccttcagcccctgcctcggccagaggtttcatttttaactgaatatttacgaaagctggaagcgtgcgaggggggtggggtggggtggaaatagcggctgcttcttttccagggatttatttaatggggatgtgttcaaggcaagagcgaattcagaaggatatcgacgtcgtgatccagaagtccagagctgagaaggactgcctgtttgcagatttcagatactctgactccacctttacttttacctacgttggcggccccagaagtgtatcctactcagtacatgtatctgaagattacccagataatacatatgtgtcaagttcagagaatgatgaagatgtgctagttactacagagccaataccagtaatttttcatagaatagcaacagaattaagaaaaacaaatgacattaactgttgcttatccataaaatccaaattacaaaaggaaaatggggaggaatcaagacagaatagtacagtggaggaagattctgaaggtgacaatgattccgaagaattttattacggagggcaggtgaactatgatggggaactgcacaagcacccacaactggaagctgatttgtcagcagttagagagatatatgggccacatgcagtttctctcagggaatatggagccattgatgatgtagatattgatctgcatatcgatgttagctttcttgatgaggagattgctgtggcttgggaagtaattcgaacagaacctataattgttcgactacactgttcacttacacagtatttaaatggcccagtgcccactgttgatgtctttcagatttccacaaaagagcgatttggattgggacatcagctgaaaaaaatcatgcagacatttgttacacagcagtggaaacagagcaaagaaaaatccaattgcctgcacaataaaaagttgtcagagaagaaagtgaagtctcccctgcatttattttctactttgcgcaggtcgccaagttatcctccccctggttgtggcaaaagcaaatccaaactgaaatctgagcaggacggaatctccaaaacgcataagctgctgcggaggacttgttccagcacagtcaagactgatgatgtgtgtgtcacaaagtcacacaggacctttggccgctccttgtccagcgatcccagggcggagcaggctatgacagcaattaaatcgcacaaacttttgaaccgtccttgccctgcagctgttaagtcagaggaatgcctaactctaaagtcgcatagactattgactcgatcttgttctggagatccacgatgtgagcacaacacaaacttgaagccccataaactgttaagcaggtcttactctagtaatctcagaatggaagaattatatggactgaaaaatcacaaattgctcagcaagtcctactccagtgcccccaagtcatccaaaactgagcttttcaaggaacctaacgcagagggcaggaggctctctcttacctcagggcttattggtatcctaacaccatcttcatcttcatcttctcagcttgctccaaatggtgcaaaatgcattccagtacgagaccgtggcttcctggtgcagacaattgagtttgctgaacagcggatccctgtattaaatgaatattgtgtggtttgtgatgagccacatgtgtttcaaaatggccctatgcttaggcctaccgtatgtgaacgggagctgtgtgtgtttgcttttcaaaccctgggagtaatgaatgaagctgctgatgaaatagcaactggagctcaggtggtagatctactagtatccatgtgtaggtctgcgttggaatctcctagaaaagttgtgattttcgagccatatccttctgtggtagatcctaatgatcctcagatgttggccttcaaccccaggaaaaagaactatgatcgagtaatgaaagcactggatagcataacttctatcagagaaatgacacaagcaccatatctggaaatcaagaagcaaatggataaacaggacccccttgctcatcccttactgcaatgggttatatcaagtaatagatcacatattgtgaaactgccagttaacaggcaattgaagtttatgcatactccacatcagttccttcttctcagcagtccaccagccaaagaatccaattttagagctgctaaaaaactctttggaagcacctttgcatttcatggctcacacattgaaaactggcactccatcctgaggaatggtctggttgttgcttctaatacacgattgcagctccatggtgcaatgtatggaagtggaatctatcttagtccaatgtcaagcatatcatttggttactcagggatgaacaagaaacagaaggtgtcagccaaggacgagccagcttcaagcagtaaaagcagcaatacatcacagtcacagaaaaaaggacagcaatcccaattcctgcaaagccgtaacttaaaatgcatagccttatgtgaagtgatcacctcatctgacctgcacaaacatggagagatatgggttgtccccaatactgaccatgtctgcacacgattctttttcgtctatgaagacggccaagtgggagatgcaaatattaatacacaagaaggaggcattcacaaagagatcctccgagtaattggtaatcaaactgctactggttaaaggaccaccatttaattaacatgattcgaaagccttcctcgggttcaaagctggattttgaactgaagaagattataaaattatttattgttattataaacaaaattaaccctttgaatactgattttttttcttagtatttctaagtatctcattaaatacctaaaatggtataagatttatcaattgtagggttatggaatctagtaataaaatttcaacagcacttaaactgaagtttgggttgctcatacaataaacagattgaaaaaactgttttgtgctgatatttttatactaaactctttaactggatatttggtattatataccgacattttaggttaccaaaatagaattgagaacattttataatggcatctaaatctatcagatactttgcaataagtatactgtttgcacattctgatgtgctatatcattagtagtatgggcattctaatgttttggaaggggtgttccctattctatttttcttcataaaaaaagaagtaggtcttagaagcagtgctttgccaaaaagtatgtaatatacacatctatacattcatgcatcaaaatgtgtggttgtgaatatatttgtgtatattcacacgtatgttttgacaagaaagatggcttagcttcacaattctatcctcgtttaatggaaagaagataatatttagtaagcaataaatttggacataaatcaagatatgagccagatttaccaccattcattcactgaaaatatttgcagacaatttttctgtttgtctgaagaaattcagcccttttaaaatgttatctaaaagtcataatttggggaacatacatggcctggtagaccgaatctatattcaaatgattatgtatttaaaagaaagacctcagaatttaaagaaaccatatatattttttatttactacaaaaaaattatacaattttatttatgccacaccagcatttttatatttgttcatctaatatctctgcttatttttttcatattgagaaagaacacaaacttgatgcttcttttatattaaaagaccacaaataagtttatagagaacagtaacaccagctctcagcatttccttttcaagagtcataatttcatcaaaatcatttcttattctttgagtcctagagttcttattcatcaagttttaattgacagtgtttattttcccacatgttgtctttggaataaggccattcatgaaagcagtttaattagtgagtctgccactctattcaaaccctgaatcaaggctctatctgattttaatttatgtaaaaaaaaataaaaatgtatagtcatttgcaagtataatgtgataactgctgtgtttatttcctttgtctggcataaaaggtgagaaaaaggtcatacatgttgttaagggtagcagtttaggaagtgttttctaataatttgttttgttatattgcaaataattgatatgccacttatttctgcaagaaaaataggcttgaagtggttgggatattaatcattttgatagtatctacttaaagcattgatctgttttgacttgtggctctgaaccctgggctaggctgagggataatagtagtggagtagggcaaagatataatatcctatccagtgttttgtgaccacttatttgaagattagtgtgggacatgaggaccttgctacttttttgccaagatgctgcaagtctcccaaatcacttcaactgtgtttttaaaacatgtttaagcaacagaattatttttttgaaattagtctatacgttagacagtctatacatgacaaacatgaagatctaatatcaagatttgggagacgggatcttggaactccacctgtttgaccactaggaccactgaggcacctccaataagctctgtagagtgcctccagcataattcaaaatccactgacctaatccattatggctttacttaacattggagtgatccgtaaagaatatagtattggagtctgaactggaacggtaactcgtaagactcaagaaagaccgtttaaggaaaattggcataatacaaactgttcctgttgacttaagaataacagtaggttcacctatctgaggaaattaagtagttgatagtttaatgctaggcatcttttatgataataaagtaagatgtcttcttatgacagttaattgagttgtatcatgatacagaatgacagattttgtttcaaacaattgcgtcagaacctttgtaagcaaatattctaaggagaatcaatcttattttttaattgaactttttgaaattagggatactataataactgataaagatgaatttctgtgtttctaaagaatctaatttcaattactaccattaacatataaatgtgcttccaaaatccaagcaggtccatacaatttagagatttgaacactgttatcatgctttaattcagtcattcattaaaatattatctattcacttatttgatgattccaaacatttgatattgtattgtgtttttataattatttgaaatctgttcaccaatgctttgtaatggttttattaattgtgtagccattgctacttagatagtaacccactgagcaaaggcagtcatttattttcatccttgaagtaggggaagaaaattattaatttattagttctactttttcctgcattgcttattttgtaaacattttactatgaataatctgttctctttcactgtattaaaaggagaagaaaatgaacatttgagaatggaaaaaagtaataatatacaaataatctagtgctataaaatgcattatagtaagacacttttggtgtcttcgagtgcactatgttggaataaattttatacttgttgcttagtaaatctcagtcatacgtttggtttgaagctgtttttttttttaatttgaagtttaattttaaaagtgccacattgtaaaagttaccgttaaatactatgtagtataaaaaaccaacccaagctattgttaatgctctgaatgtttttctttgaaaatttaagtttagagaagaaattccttcatttttctcccctttgctaaaagaaagaaaatctataatatgtaagtctatgaatctttaaataactgaaggaattttagcagtactttgtataataaaaatattttttaaactataacttgccttagagcatggggtttcagaaagttttgacgaaaaactcatcttcattaaagagtctggataacttcatcagatggtaatttaatatgtcatgaaggggacactcaacattgggtcatctaccgtctaaataaatacggatttcatggtggcatttgaagcacattttgcaaacattatgatgttctattgtcttgctgaattctttattataacactacctcaagacaaatgatagactgttggtaaggtaaattgggttttcaatgtcaggaacaaataaaattttgcaaatagaagtcatcaaataattcaacaggaagaccatactggacacagatgttgtcagttacttctggacaatgtggtaacatggatatttcagtcactggtaacaatgtcagggttaacacccaatgaattatttgaaacaatttgggttgcaaaatttgaaattaattagtctattttgagattgattttctacgtgggccaattttatgtccattacctaaagccacaatctcccgctctaaggagttaaaggatgaaaacacccaactgctacactggaatggcagactggatattcaagcattttggcatttaatgcctgctaaatttttgtccgattatatatagatttgatgtatattattacccagtaaattcttcttgggaattttgtatacattatggaatattaggataagtttttgtaggtcagaagaatttcaagtagtttttagacaaaacatatccatgagtgtgaaaaaagctgtgttgacgaatagattacatttcacatttaccagcaagtcagtaaaaaatagtgcttatttacatagtcaatataatttaatgttctaaaaataatatcttcgatctgcccaatatttaatgtatcatttgagatttttaaaaatgcatccgctccattatgtaaacattaagatatgcctatgtttctttaactatacagcctctttacaataaatttcttgatttttgtgcacaggatagtattgcaacctgctatttagcctttggtgccttagaattattataaatatttaacaatatgtacataatgtaaatactgccaagagatcagtaaggccaaatattttctctattcactttttattgctcttgctttctattgctactaaagcctcttttatccagctttgtaatagttccaacattgtagcgaatgtaaatgtttactttcaataaatctgaacttgttcaacaagta

SEQ ID NO: 81 - DNA, 6628 bp, Homo sapiens
ctcctcggtgcaacctatataaggctcacagtctgcgctcctggtacacgcgcttcaacttcggttggtgtgtgtcgaagaaacctgactgcgccctgaggagaacagcggagaaggtccaccgagcctggcgaaaggtccgctgagcgggctgtcgtccggagccactccgggctgcggagcacccagtggagaccgcgcctggctcaggtgtgggaccccatccttcctgtcttcgcagaggagtcctcgcgtgaaataagcgggttttgaaaacaaaaaaaagaaggagtggaagagggggccaggatccaggcctccatccccacagaagtgaagctacagctgggaggtctcctcccaccccaaccgtcaccctgggtcccgactgcccacctcctcctcctccccctccccccaacaacaacaacaacaacaactccaagcacaccggccataagagtgcgtgtgtccccaacatgaccgaacgaagaagggacgagctctctgaagagatcaacaacttaagagagaaggtcatgaagcagtcggaggagaacaacaacctgcagagccaggtgcagaagctcacagaggagaacaccacccttcgagagcaagtggaacccacccctgaggatgaggatgatgacatcgagctccgcggtgctgcagcagctgctgccccaccccctccaatagaggaagagtgcccagaagacctcccagagaagttcgatggcaacccagacatgctggctcctttcatggcccagtgccagatcttcatggaaaagagcaccagggatttctcagttgatcgtgtccgtgtctgcttcgtgacaagcatgatgaccggccgtgctgcccgttgggcctcagcaaagctggagcgctcccactacctgatgcacaactacccagctttcatgatggaaatgaagcatgtctttgaagaccctcagaggcgagaggttgccaaacgcaagatcagacgcctgcgccaaggcatggggtctgtcatcgactactccaatgctttccagatgattgcccaggacctggattggaacgagcctgcgctgattgaccagtaccacgagggcctcagcgaccacattcaggaggagctctcccacctcgaggtcgccaagtcgctgtctgctctgattgggcagtgcattcacattgagagaaggctggccagggctgctgcagctcgcaagccacgctcgccaccccgggcgctggtgttgcctcacattgcaagccaccaccaggtagatccaaccgagccggtgggaggtgcccgcatgcgcctgacgcaggaagaaaaagaaagacgcagaaagctgaacctgtgcctctactgtggaacaggaggtcactacgctgacaattgtcctgccaaggcctcaaagtcttcgccggcgggaaactccccggccccgctgtagagggaccttcagcgaccgggccagaaataataaggtccccacaagatgatgcctcatctccacacttgcaagtgatgctccagattcatcttccgggcagacacaccctgttcgtccgagccatgatcgattctggtgcttctggcaacttcattgatcacgaatatgttgctcaaaatggaattcctctaagaatcaaggactggccaatacttgtggaagcaattgatgggcgccccatagcatcgggcccagttgtccacgaaactcacgacctgatagttgacctgggagatcaccgagaggtgctgtcatttgatgtgactcagtctccattcttccctgtcgtcctaggggttcgctggctgagcacacatgatcccaatatcacatggagcactcgatctatcgtctttgattctgaatactgccgctaccactgccggatgtattctccaataccaccatcgctcccaccaccagcaccacaaccgccactctattatccagtagatggatacagagtttaccaaccagtgaggtattactatgtccagaatgtgtacactccagtagatgagcacgtctacccagatcaccgcctggttgaccctcacatagaaatgatacctggagcacacagtattcccagtggacatgtgtattcactgtccgaacctgaaatggcagctcttcgagattttgtggcaagaaatgtaaaagatgggctaattactccaacgattgcacctaatggagcccaagttctccaggtgaagagggggtggaaactgcaagtttcttatgattgccgagctccaaacaattttactatccagaatcagtatcctcgcctatctattccaaatttagaagaccaagcacacctggcaacgtacactgaattcgtacctcaaatacctggataccaaacataccccacatatgccgcgtacccgacctacccagtaggattcgcctggtacccagtgggacgagacggacaaggaagatcactatatgtacctgtgatgatcacttggaatccacactggtaccgccagcctccggtaccacagtacccgccgccacagccgccgcctccaccaccaccaccgccgccgcctccatcttacagtaccctgtaaatacctgtcatgtccttcaggatctctgccctcaaaatttattcctgttcagcttctcaatcagtgactgtgtgctaaattttaggctactgtatcttcaggccacctgaggcacatcctctctgaaacggctatggaaggttagggccactctggactggcacacatcctaaagcaccaaaagaccttcaacattttctgagagcaacagagtatttgccaataaatgatctctcatttttccaccttgactgccaatctaactaaaataattaataagtttactttccagccagtcctggaagtctgggttttacctgccaaaacctccatcaccatctaaattataggctgccaaatttgctgtttaacatttacagagaagctgatacaaacgcaggaaatgctgatttctttatggagggggagacgaggaggaggaggacatgacttttcttgcggtttcggtaccctctttttaaatcactggaggactgaggccttattaaggaagccaaaattatcggtgcagtgtggaaaggcttccgtgatcctctcgctgcacccttagaaacttcaccgtcttcaaactccatttccatggttctgttaattctcaaggagcagcaactcgactggttctcccaggagcaggaaaaacccttgtgacatgaaacatctcaggcctgaaaagaaagtgctctctcagatggactcttgcatgttaagactatgtcttcacatcatggtgcaaatcacatgtacccaatgactccggctttgacacaacaccttaccatcatcatgccatgatggcttccacaaagcattaaacctggtaaccagagattactggtggctccagcgttgttagatgttcatgaaatgtgaccacctctcaatcacctttgagggctaaagagtagcacatcaaaaggactccaaaatcccatacccaactcttaagagatttgtcctggtacttcagaaagaattttcatgagtgttcttaattggctggaaaagcaccagctgacgttttggaagaatctatccatgtgtctgcctccatatgcatctgggcatttcatcttcagtcccctcattagactgtagcattaggatgtgtggagagaggagaaatgatttagcacccagattcacactcctatgcctggaagggggacatctttgaagaagaggaattagggctgtggacactgtcttgaggatgtggacttccttagtgagctccacattacttgatggtaaccacttcaaaaggatcagaatccacgtaatgaaaaaggtccctctagaggatggagctgatgtgaagctgccaatggatgaaaagcctcagaaagcaactcaaaggactcaaagcaacggacaacacaagagttgtcttcagcccagtgacacctctgatgtcccctggaagctttgtgctaacctgggactgcctgacttcctttagcctggtcccttgctactaccttgaactgttttatctaacctctctttttctgtttaattctttgctactgccattgaccctgctgcaggatttgtgtcattttcctgcctggttgctgagactccattttgctgccacacacagagatgtaagaggcaggctttaattgccaaagcacagtttgagcagtagaaaacaacatggtgtatatctcaaattgcctgacatgaagaggagtctaacggtgaagtttcacttttcatcagcatcatctttcacatgttcattatcatctgctcttattcttgcatgtttaaacacttaaaatttttagtataatttttagtgtgttttgaagtggtgactaggctttcaaaaacttccattgaattacaaagcactatccagttcttattgttaaactaagtaaaaatgataagtaacatagtgtaaaatattcctttactgtgaacttcttacaatgctgtgaatgagaggctcctcagaactggagcatttgtataataattcatcctgttcatcttcaattttaacatcatatataatttcaattctatcaattgggcctttaaaaatcatataaaaggatataaaatttgaaaagagaaacctaattggctatttaatccaaaacaactttttttttccttcaatggaatcagaaagcttgtcaatcactcatgtgttttagagtaattacttttaaaatggtgcatttgtgcttctgaactattttgaagagtcacttctgtttacctcaagtatcaattcatcctccatacatttgaattcaagttgtttttttgtcaaatttacagttgtcaattgatcttcaagctgcagggtgcctagaaatgggccgttgtctgtagccctggcatgtgcacacggacatttgccaccactgcaagcaaaagtctggagaagttcaccaacgacaagaacgattagggaaaatatgctgctgtgggttaacaactcagaaagtccctgatccacatttggctgtttactaaagcttgtgattaactttttggcagtgtgtactatgctctattgctatatatgctatctataaatgtagatgttaaggataagtaattctaaatttattattctatagttttgaagtttggttaagtttcctttcactcaattgatttattttgttgttaatcaaatttatgttaattggatcctttaaattttttttggcattttccaacaaaaatggctttattcataagaaaggaaaaaaatcaatggaatttgatatctaaagaagttagaaagggagcaaaataaaaaacataaaggagatagatgaattagtaagcaaatcagtagtcgagtttttcaaactggcaaaattaattaattgacttttagcccaaatttacattgttaattaaatcaagaaggaagaagatctaagagctcccattgataggcaagcctagagagaactagctaaatttatcatgctaggatattgaaacacagaaagtttacatacatttatgaagggtcaatttagtttggacagtgaggtatttgtcttagtggaaaaaaggagaattagtctgatcaaatcgtgaagtaatacagtgaacttgcaggtgcacaaaataagagggccacatctatatggtgcagtctggaattctgtttaagtttgtaggtacctcttggacttctgaattgatccagttgtcatccaccacagacatctcacatcagatacagacagttccaagattgacaacagagaacaacctgctggaaagacctgggcagaaatggagagccctgcgggaaccatgctacattttcatctaaagagagaatgcacatctgatgagactgaaagttctttgttgttttagattgtagaatggtattgaattggtctgtggaaaattgcattgcttttatttctttgtgtaatcaagtttaagtaataggggatatataatcataagcattttagggtgggagggactattaagtaattttaagtgggtggggttatttagaatgttagaataatattatgtattagatatcgctataagtggacatgcgtacttacttgtaaccctttaccctataattgctatccttaaagatttcaaataaactcggagggaactgcagggagaccaacttatttagagcgaattggacatggataaaaaccccagtgggagaaagttcaaaggtgattagattaataatttaatagaggatgagtgacctctgataaattactgctagaatgaacttgtcaatgatggatggtaaattttcatggaagttataaaagtgataaataaaaacccttgcttttacccctgtcagtagccctcctcctaccactgaaccccattgcccctacccctccttctaactttattgctgtattctcttcactctatatttctctctatttgctaatattgcattgctgttacaataaaaattcaataaagatttagtggttaagtgcaaaaaaaaaaaaa

SEQ ID NO: 82 - DNA, 2717 bp, Homo sapiens
gcgcttccggtgcgacgctgtctctccatgccaggactgagttgtgggggagggaggcggttagcgggctttagcgccttttctggcggcggtagatttgaagcgcttcaaaggaccggacccagagaagaggaaaactctaccggtgcaggagcacagggatcagttgtccttgtttttttttggtcttttcttcatttgaagattaagtattggagccatgggaataaaggttcaacgtcctcgatgtttttttgacattgccattaacaatcaacctgctggaagagttgtctttgaattattttctgatgtgtgccccaaaacatgcgagaactttcgttgtctttgtacaggtgaaaaggggaccgggaaatcaactcagaaaccattacattataagagttgtctctttcacagagttgtcaaggattttatggttcaaggtggtgacttcagtgaaggaaatggacgaggaggggaatctatctatggaggattttttgaagacgagagtttcgctgttaaacacaacaaagaatttctcttgtcaatggccaacagagggaaggatacaaatggttcacagttcttcataacaacgaaaccaactcctcatttagatgggcatcatgttgtttttggacaagtaatctctggtcaagaagttgtaagagagattgaaaaccagaaaacagatgcagctagcaaaccgtttgcggaggtacggatactcagttgtggagagctgattcccaaatctaaagttaagaaagaagaaaagaaaaggcataaatcatcatcatcttcctcctcctcatctagtgactcagatagctcaagtgattctcagtcctcttctgattcctctgattccgaaagtgctactgaagagaaatcaaagaaaagaaaaaagaaacatcggaaaaattcccgaaaacacaagaaagaaaagaaaaagcgaaagaaaagcaagaagagtgcatctagtgagagtgaagctgaaaatcttgaagcacaaccccagtctactgtccgtccagaagagatccctcctatacctgaaaatagattcctaatgagaaaaagtcctcctaaagctgatgagaaggaaaggaaaaacagagagagagaaagggaaagagagtgtaatccacctaactcccagcctgcttcataccagagacgacttttagttactagatctggcaggaaaattaaaggaagaggaccaaggcgttatcgaactccttccagatccagatcaagggatcgtttcagacgtagtgagactcctccacattggaggcaagagatgcagagagctcaaagaatgagggtatcaagtggtgaaagatggatcaagggggataagagtgagttgaatgaaataaaagaaaatcagagaagtccagttagagtaaaagagagaaaaataacagatcacaggaatgtatctgagagtccaaacagaaaaaatgaaaaggagaagaaagttaaagaccataaatctaacagcaaagagagagacatcagaagaaattcagaaaaagatgacaagtataaaaacaaagtgaagaaaagggccaaatctaaaagtaggagtaagagcaaagagaaatcaaagagtaaagaaagagattcaaaacataatagaaatgaagaaaagaggatgaggtcaaggagtaaaggaagggatcatgaaaatgttaaagaaaaagaaaagcagtctgattctaaaggaaaagatcaggaaaggagtagaagtaaagagaagtctaaacagttagaatcaaagagtaatgagcatgatcacagtaaaagtaaggaaaaggatagacgcgcacaatccaggagtagagaatgtgatataactaaaggtaaacacagttataatagcagaacaagagaacgaagcagaagtagggacagaagcagaagagtgcgatcaagaacccatgacagagatcgcagcagaagcaaggagtaccatagatacagagaacaggaatacaggagaagaggacggtcacgaagccgagagagaagaacaccaccaggaagatcaagaagtaaagataggaggagaaggaggagagactcacggagctcagagagagaagaaagtcaaagcagaaacaaagacaaatacagaaaccaagagagtaagagctcacacagaaaagaaaattctgagagtgagaaaagaatgtactctaaaagtcgtgatcataatagctcaaataacagcagggaaaaaaaggctgatagagatcaaagtcccttctcaaaaataaaacaaagcagtcaggacaatgaattaaagtcctccatgttgaaaaataaggaggatgagaagatcagatcctcagtggaaaaagaaaaccaaaaatcaaaaggtcaagaaaatgaccatgtacatgaaaaaaataaaaaatttgatcatgaatcaagccctggaacagatgaagacaaaagcggatgagtgagttatataaacttacttccattctgtttcggattttaagtttgagagacttgctaatgaatctcctttatgttgttttccttttcattgtttttggattgttttatgtttgtccttttttttcttaatgtggatttcattgagttgattttttgataatctgcaatctggataatttgtactgctaaagttttaataaactcgacatgagaaaaacaaaaaaaaaaaa

SEQ ID NO: 83 - DNA, 4072 bp, Homo sapiens
caccatgatgaagacggagccacgggggcccgggggtcccctccggagcgcctccccgcaccgcagcgcctacgaggcgggcatccaggcgctgaagccgcccgacgcgcccgggcccgacgaggcacccaagggggcccaccacaagaaatatggctccaacgtccaccgcatcaaaagtatgttcctgcagatgggcacgacggcggggccctcgggcgaggcgggcggcggcgcgggcctggccgaggccccacgggcgtccgagcgcggcgtgcgcctgtcgctgccgcgggccagcagcctgaacgagaacgtggaccacagcgccctgctgaagctgggcaccagcgtgtcggagcgcgtgagccgcttcgactccaagcccgcgccctccgcgcagcctgcgccgccgccgcacccgccgtcccggctgcaggagacgcggaagctgttcgaacggagcgccccagcggccgcaggcggcgacaaggaggccgcggcgcggcggctgctgaggcaggagcgcgccggcctgcaggaccggaagctggacgtcgtggtgcgcttcaacggcagcaccgaggcgctggacaagctggacgctgacgccgtgtcccccacggtcagccagctcagcgccgtcttcgagaaggccgactcgaggaccggcctccaccgcgggcccgggctccccagggccgcaggggttccccaggtcaactcgaagctggtcagcaagcggtcccgggtgttccagcccccgccgccgccgccgcccgccccgtcgggggatgccccggccgagaaagagcgatgccccgcagggcagcagcccccgcagcaccgagtggcccctgcccggccgccccccaagccccgggaggtgcgcaagattaagccggtggaggtggaggagagcggggagtcggaggccgagtcggcgcccggggaggtgatccaggccgaggttacggtccacgcggccctggagaatggcagcaccgtggcaactgcagccagccccgcgcccgaggagccaaaggcccaagcggccccggagaaggaggcggcggcggtagcgccgccagagaggggggtgggcaatggccgggccccggacgtggcccctgaggaggtagatgaatccaagaaggaggacttctcggaggcggacttggtggacgtgagcgcctacagtgggctcggggaggactctgcgggcagtgccctggaggaggacgacgaagacgacgaggaggatggggagcccccctacgagcccgagtcggggtgcgtggagatcccggggctgtcggaggaggaggacccagccccgagccggaagatccatttcagcacggcgcccatccaagtgttcagcacttactccaacgaggattacgatcgtcgcaacgaggatgtggatcccatggcagcctctgctgagtacgagctggagaagcgtgtggagaggttggagctgttccctgtggagctggagaaggactccgagggcctgggcatcagcatcatcggcatgggcgccggggcagacatgggcctggagaagctgggtatcttcgtcaagaccgtgacggagggtggtgcggcccatcgggatggcaggatccaggtgaatgatctcctggtggaggtggatggaacaagtctggtgggagtgacccagagcttcgcggcgtctgtgctccggaacaccaagggccgagtgcggtttatgattggccgggagcggccgggagagcagagcgaagtggcccagctaattcagcagactttggaacaggagcgatggcagcgggagatgatggagcagagatacgcccagtatggggaggatgacgaggagacgggagagtatgccactgacgaggatgaggagctgagccccacgttcccgggtggtgagatggccatcgaggtgtttgagctagcggagaacgaggatgcactgtcccctgtggacatggagcccgagaagctggtgcacaagttcaaggagctccagatcaagcatgcggtcactgaggcagagatccagcagctgaaaagaaagctgcagagcctggagcaggagaaggggcgctggcgggtggagaaggcgcagttggagcagagtgtggaggagaacaaggagcgcatggagaaactggaaggctactggggtgaggcccagagcctgtgccaggctgtggacgagcacctgcgggagactcaggcgcagtaccaggccctggagcgcaagtacagcaaggccaagcgcctcatcaaggactaccagcagaaggagatcgagttcctgaaaaaggagactgcacagcgtcgggttctggaggagtcggagctggccagaaaggaggagatggacaagctcctggacaagatctcagaactggaaggaaacttgcaaacactgaggaattccaattctacttaacaggaatcattccatgactggacaataattaacccccctcccattgtcctccctcccctgtcctcaacaccccacccctcccccttccagcctggggacaggtgccccgactccccccacccctccaccccacctcccccagcttcagggaccagagggctcatatcacaggcccccttaagatggcctgggcagacagaggtggctagaagggcagcctctttcttgccccatggggctgaggcacagaggccgagggctgccgagggctggcctggtggtcgacggacacaagcacctgcagatcaaactgccagactttacacactccagcttttgtctctggactggaacggggctggggctctcccagcatctgccaactgggggctgctccctgcccatggggcacctgggtggcccctgggcctcttgacttgagattctaccttctcggcccttccctctccccccatcattgtgccgtctctgttgcattctgaccctcccgcctggggggtgggggcgttgcctcaacacctcccccatccctgttccctgtcctgggagggatagagtccaccccagagcccggaggctgggcctggccctggccctgcactgatttctcatgtgtccttcgggaaaagggggagtgagagtgggaaaaagggagagttcaggacacctggtccccagctccccattgcctggggcagcagccctcaatttctccttgtgcctcccctcttccaggtgccaaatagccataacctcgtcttggaactgttatgtggcctctctggggtccaggtttcctggtcaagcctgggaatgccagggaggaaagggggtctggctacagcgaccctggtcttaggcaaggggaacatttctccctggagagtcaggtcctatcctgtgctgccctgtctgcccagcccagggcgatgcctggaagcctactgacattgcagggagtcagcctcgcccccaccccctactggttttccaatgttttgactggagggcaaaattttactactactcatctttttggagaccagggctgccctgctggcagcctgccttctaagtgaaatcgactctgtttccccactttaaccccaaattggggcttggaccaagggaggtgagaccacctcccccaggtcccctcccctttcaaaatccatctcattttgccacttcatgcccctgccctaactgggtttttgttcattttttaaaaacagaccacccatcccatccgttttggcttcttgtcccctgtaaatagaccatgacttcgatcagtatttcttgtccccaccccttcctatccccagatgtgcccccatcccctgaaggagctggctgtctcagtcctgggctcgcgcacttcaccccggcagatggagggggcggaaccgggtgggcggggccgcttcgggctgcttgggccagcggccacccctgcccagccgtcgggagggccgcatctctgtatataatatatatatgtatgtattgttcccggttttgtacggaccatgccctctgtcaggtcgtccccataaaagcagcccccagagcaaaaaaaaaaaaaaaaaa

SEQ ID NO: 84 - DNA, 2492 bp, Homo sapiens
atagaggggcggtcccaacagtgggcggggtagagccgcgccgcaggacggagggtctggacactttggggtcacgtgctcattccgtttccctacctcccccaaccttatcccgcccctgggggttcgcgggcatttttcaggaactttctttccggcttgagaagccgccactcccaagatggaggtacgctgcgccgccattaagagctagccctcagaactatcctctctaaggtttcacagtcctgcccaagatggccgtctcggctctggcaccgcccccactcctgcctctcccaacatggcgaccctgagtctccgttcccggtgcggaacgtacgaccggaagtgacggggtccagaaatttccgctttctttctgcagcaggaaccgcggctgctggacaagaggggtgcggtggatactgacctttgctccggcctcgtgtagcgtgaagacacagcgcatctccccgctgtaggcttcctcccacagaacccgtttcgggcctcagagcgtctggtgagatgctgttgccgctgctgctgctgctacccatgtgctgggccgtggaggtcaagaggccccggggcgtctccctcaccaatcatcacttctacgatgagtccaagcctttcacctgcctggacggttcggccaccatcccatttgatcaggtcaacgatgactattgcgactgcaaagatggctctgacgagccaggcacggctgcctgtcctaatggcagcttccactgcaccaacactggctataagcccctgtatatcccctccaaccgggtcaacgatggtgtttgtgactgctgcgatggaacagacgagtacaacagcggcgtcatctgtgagaacacctgcaaagagaagggccgtaaggagagagagtccctgcagcagatggccgaggtcacccgcgaagggttccgtctgaagaagatccttattgaggactggaagaaggcacgggaggagaagcagaaaaagctcattgagctacaggctgggaagaagtctctggaagaccaggtggagatgctgcggacagtgaaggaggaagctgagaagccagagagagaggccaaagagcagcaccagaagctgtgggaagagcagctggctgctgccaaggcccaacaggagcaggagctggcggctgatgccttcaaggagctggatgatgacatggacgggacggtctcggtgactgagctgcagactcacccggagctggacacagatggggatggggcgttgtcagaagcggaagctcaggccctcctcagtggggacacacagacagacgccacctctttctacgaccgcgtctgggccgccatcagggacaagtaccggtccgaggcactgcccaccgaccttccagcaccttctgcccctgacttgacggagcccaaggaggagcagccgccagtgccctcgtcgcccacagaggaggaggaggaggaggaggaggaggaggaagaagaggctgaagaagaggaggaggaggaggattccgaggtgcagggggagcagcccaaggaggccccaccgccactgtcacccccgcagccggccagccctgctgaggaagacaaaatgccgccctacgacgagcagacgcaggccttcatcgatgctgcccaggaggcccgcaacaagttcgaggaggccgagcggtcgctgaaggacatggaggagtccatcaggaacctggagcaagagatttcttttgactttggccccaacggggagtttgcttacctgtacagccagtgctacgagctcaccaccaacgaatacgtctaccgcctctgccccttcaagcttgtctcgcagaaacccaaactcgggggctctcccaccagccttggcacctggggctcatggattggccccgaccacgacaagttcagtgccatgaagtatgagcaaggcacgggctgctggcagggccccaaccgctccaccaccgtgcgcctcctgtgcgggaaagagaccatggtgaccagcaccacagagcccagtcgctgcgagtacctcatggagctgatgacgccagccgcctgcccggagccaccgcctgaagcacccaccgaagacgaccatgacgagctctagctggatgggcgcagagaacctcaagaaggcatgaagccagcccctgcagtgccgtccacccgcccctctgggcctgcctgtggctctgttgccctcctctgtggcggcaggacctttgtggggcttcgtgccctgctctggggcccaggcggggctggtccacattcccaggccccaacagccttcaaagatgggtaaaggagcttgccctccctgggccccccaccttggtgactcgccccaccacccccagccctgtccctgccacccctcctagtggggactagtgaatgacttgacctgtgacctcaatacaataaatgtgatcccccacccaaaaaaaaaaaaaaaaa

SEQ ID NO: 85 - DNA, 4131 bp, Homo sapiens
gcagtgccgggcgccagagcagcggcgccagagcagctgcaccatcccggcgttcgcgtgtgccgccgctttcctcctccatctcttttcctccgcctccgccggcgcgatggcgaagccgctgacggacagcgagaagcggaagcagatcagcgtgcgcggcctggcggggctaggcgacgtggccgaggtgcggaagagcttcaaccggcacttgcacttcacgctggtcaaggaccgcaatgtggccacgccccgcgactacttcttcgcgctggcgcacacggtgcgcgaccacctcgtgggccgctggatccgcacgcagcagcactactacgagcgcgaccccaagcgcatttattatctttccctggaattctacatgggtcgcacgctgcagaacacgatggtgaacctgggccttcagaatgcctgcgatgaagccatctatcagttggggttagacttggaggaactcgaggagatagaagaagatgctggccttgggaatggaggcctggggaggctggcagcgtgtttccttgactcaatggctaccttgggcctggcagcatacggctatggaatccgctatgaatttgggatttttaaccagaagattgtcaatggctggcaggtagaggaggccgatgactggctgcgctacggcaacccctgggagaaagcgcggcctgagtatatgcttcccgtgcacttctacggacgcgtggagcacacccccgacggcgtgaagtggctggacacacaggtggtgctggccatgccctacgacaccccagtgcccggctacaagaacaacaccgtcaacaccatgcggctgtggtccgccaaggctcccaacgacttcaagctgcaggacttcaacgtgggagactacatcgaggcggtcctggaccggaacttggctgagaacatctccagggtcctgtatccaaatgataacttctttgaggggaaggagctgcggctgaagcaggagtacttcgtggtggccgccacgctccaggacatcatccgccgcttcaagtcgtccaagttcggctgccgggaccctgtgagaacctgtttcgagacgttcccagacaaggtggccatccagctgaacgacacccaccccgccctctccatccctgagctcatgcggatcctggtggacgtggagaaggtggactgggacaaggcctgggaaatcacgaagaagacctgtgcatacaccaaccacactgtgctgcctgaggccttggagcgctggcccgtgtccatgtttgagaagctgctgccgcggcacctggagataatctatgccatcaaccagcggcacctggaccacgtggccgcgctgtttcccggcgatgtggaccgcctgcgcaggatgtctgtgatcgaggagggggactgcaagcggatcaacatggcccacctgtgtgtgattgggtcccatgctgtcaatggtgtggcgaggatccactcggagatcgtgaaacagtcggtctttaaggatttttatgaactggagccagagaagttccagaataagaccaatggcatcaccccccgccggtggctgctgctgtgcaacccggggctggccgataccatcgtggagaaaattggggaggagttcctgactgacctgagccagctgaagaagctgctgccgctggtcagtgacgaggtgttcatcagggacgtggccaaggtcaaacaggagaacaagctcaagttctcggccttcctggagaaggagtacaaggtgaagatcaacccctcctccatgttcgatgtgcatgtgaagaggatccacgagtacaagcggcagctgctcaactgcctgcacgtcgtcaccctgtacaatcgaatcaagagagacccggccaaggcttttgtgcccaggactgttatgattgggggcaaggcagcgcccggttaccacatggccaagctgatcatcaagttggtcacctccatcggcgacgtcgtcaatcatgacccagttgtgggtgacaggttgaaagtgatcttcctggagaactaccgtgtgtccttggctgagaaagtgatcccggccgctgatctgtcgcagcagatctccactgcaggcaccgaggcctcaggcacaggcaacatgaagttcatgctcaacggggccctcaccatcggcaccatggacggcgccaacgtggagatggccgaggaggccggggccgagaacctcttcatcttcggcctgcgggtggaggatgtcgaggccttggaccggaaagggtacaatgccagggagtactacgaccacctgcccgagctgaagcaggccgtggaccagatcagcagtggctttttttctcccaaggagccagactgcttcaaggacatcgtgaacatgctgatgcaccatgacaggttcaaggtgtttgcagactatgaagcctacatgcagtgccaggcacaggtggaccagctgtaccggaaccccaaggagtggaccaagaaggtcatcaggaacatcgcctgctcgggcaagttctccagtgaccggaccatcacggagtatgcacgggagatctggggtgtggagccctccgacctgcagatcccgccccccaacatcccccgggactaggcacaccctgccttggcgggaccagcgggcatttgttttcttgctgactttgcacctccttttttccccaaacactttgccagccactggtggtccctgcttttctgagtaccatgtttccaggaggggccatgggggtcagggtggttttgagagagcagggtaaggaaggaatgtgctagaagtgctcctagtttcttgtaaaggaagccagagttgacagtacaaagggtcgtggccagccctgcagcttcagcacctgccccacccagagtgggagtcaggtggagccacctgctgggctcccccagaactttgcacacatcttgctatgtattagccgatgtctttagtgttgagcctctggattctggggtctgggccagtggccatagtgaagcctgggaatgagtgttactgcagcatctgggctgccagccacagggaagggccaagccccatgtagccccagtcatcctgcccagccctgcctcctggccatgccgggaggggtcggatcctctaggcatcgccttcacagccccctgccccctgccctctgtcctggctctgcacctggtatatgggtcatggacccagatggggctttccctttgtagccatccaatgggcattgtgtgggtgcttggaacccgggatgactgagggggacactggagtgggtgcttgtgtctgctgtctcagaggccttggtcaggatgaagttggctgacacagcttagcttggttttgcttattcaaaagagaaaataactacacatggaaatgaaactagctgaagccttttcttgttttagcaactgaaaattgtacttggtcacttttgtgcttgaggaggcccattttctgcctggcagggggcaggtctgtgccctcccgctgactcctgctgtgtcctgaggtgcatttcctgttgtacacacaagggccaggctccattctccctccctttccaccagtgccacagcctcgtctggaaaaaggaccaggggtcccggaggaacccatttgtgctctgcttggacagcaggcctggcactgggaggtgggggtgagcccctcacagccttgcccctccccaaggctggcaacctgcctcccattgcccaagagagagggcagggaacaggctactgtccttccctgtggaattgccgagaaatctagcaccttgcatgctggatctgggctgcggggaggctctttttctccctggcctccagtgcccaccaggaggatctgcgcacggtgcacagcccaccagagcactacagccttttattgagtggggcaagtgctgggctgtggtcgtgccctgacagcatcttccccaggcagcggctctgtggaggaggccatactcccctagttggccactggggccaccaccctgaccaccactgtgcccctcattgttactgccttgtgagataaaaactgattaaacctttgtggctgtggttggctga

SEQ ID NO: 86 - DNA, 4137 bp, Homo sapiens
ttaccaaagatacatccccaggcggcaccattcacttcacatgaaagccgctgctcttggttcctgagatgatctcatctgaacatggctccagcgacctcagccacaggaactagagacagcttgctttctgtcgtggcaatgttttgaaactggcaaaatcagattttatcatgtgggcaacctgctgcaactggttctgcctggatggacagcctgaggaggtcccaccaccccagggagccaggatgcaggcctattccaaccctgggtacagctccttcccttccccaacaggcttggaaccaagctgcaagtcctgtggggctcactttgcaaacacggccaggaagcagacctgcttggactgtaagaaaaatttttgcatgacctgttcgagccaagtagggaatgggccccgcctctgccttctctgccaacggtttcgagctacagcctttcagcgagaggagctcatgaagatgaaggtgaaggacttgagggactatctcagcctccatgacatctctaccgaaatgtgccgggagaaagaagagctggtgctcttggtccttggccagcagcctgtaatctcccaggaggacaggactcgtgcctccaccttgtccccagactttcctgagcagcaggccttcctgacccagcctcactccagcatggttccacctacctcacccaacctcccctcttcatctgcacaagccacctctgttcccccagcccaggttcaggagaatcagcaggccaatggccatgtgtctcaggatcaagaggaacccgtctacctggagagcgtggccagagtacctgctgaggatgagacccagtctattgactcagaggacagctttgtcccaggccgaagggcctctctgtctgacctgactgacctggaggacattgaaggcctgacagtgcggcagctgaaagagatcttggctcgcaactttgtcaactacaagggctgctgtgagaagtgggagctgatggagagagtgacccggctatacaaggatcagaaaggactccagcacctggtcagtggtgccgaagaccaaaacgggggagcagtaccatcaggcttggaggagaacctgtgtaagatctgcatggactcacccattgactgtgttcttctggagtgtggccacatggtaacctgtaccaagtgtggcaagcgcatgaatgaatgtcccatctgccggcagtatgtaatccgagctgtgcatgtcttccggtcctgagagcttgcatcggtttcttcagtgccttacagggaaatagcctggggtgtctgggctcagggttggccagcttgcagaggagcaagctagtagaaatattgcagggttcccaaaaccaggtcaagcaagatgccatgtcacccctgagcatgcctgtcttcccaggggtgtacctcttggctggcaaagcccaaggccagtgggaacttgtataaatcacatgggtatgttcttggttcagtgatcttggagtgatgatggtaactgatgaacagagaactttccagaacttgggtcctgtcttcctccctgaacctagacagtttcacccctcctcctgtacccaacccatccccaccccatatgggagatgcttgcccatgtgtttcatcaatcagaagtcctcctccccagcacattcggatttaaatttctggtctctccggctttctgtgctttaactatctttgctaaagtctcttgctacattgcctaaatccatttgtttctttggaccaaaaatgttagtttaccagaccgatagtggtccttaggacagattttagaccagtaaacttatctttggtgagaaatgaaatacaaatgctatagaaaaatttcaaagttgttaaaagccacttcattaaatgctgggattggaagctgttggtctcctgacctgactctgggagccaacaaaacatcaggctcccaaactgctgggaaatttgtttctgtctgcaagggatagtgcgtgcataatccctgctgctgcttctcttgggacctgatttgcaccatccttagtttatgcggaaaggggaagcaatgggtggaggcagtggccttctccttaattttggcttggcttctgatccttttcccaactagaagtcttaagccacttttcgctgaaaatgaaatccctcccttatccatggtagttttaaatttggtttcattgaagaaatagatttaggcaaagagcctgtgctcttctctggccagactgctgttgaagttcctggagagcaaatgttaagacagagcacttaagagctttcaggaggtactgaatgagactggattctgttgtaagccgacagttcaagtctttatttcccaggttggtggggagtgaggagaccctactttcattccctttcctagcccactgatttttgggggcaggtcagggagaaagcattttttttttttttttgagtctcactctgttgcccaggctggagtgcagtggtacagtcttggcttactgcaacctccacctcccaggttcaagctattctcctgccttagcctccagagtagctgggattataggcgcccaccaccacaccaggctaatttttgtatttttagtagagacggggttttaccatgttcaccaggctggtcttgaactcttgaccttatgatccgcccgcctcagcttcccaaagtgctgggattacaggcgtgagccaccacacccagcaggagaaaccattttctaggctctttaggaaggaccatgcaatgagtaggtgatgtatttgagccctcacagtctttacacccctagaggagctggaggacttaagagtttgctgcagaagcgtggccaagcacaaaacacatgatcaggaaagcagagtgttttcccattaccaatggatgaactatgcaaaccctaaacgccttggcagacacctcccaccccttacccctcccatgcagctgaaaaatctgagactagaaccaatcatgactctggatggcagagggaaacctctaaagggacttattacattggtacagacatatttatgctttcttccatcaccaaccactaaacccctttggaggaatgaaataactgcataaactagtcaactgaacactgggccacttacctcaatgttatacaaagtcctggatgatttgattctgaaccacagcctttgcaggagttgggggaatcagatttgctcatgaagacatccctttccacttttgtcatgggcagtaaatactatagtttacaatgcctaccaattagcaaaggatcattcattcagctactcagttcctctgtaaaacaggtctatgtatgtgcaattcagctaagatctagcagtaacttaagggcagaagctggctctctacttacaacctgctttctctgctgaagccttacctcctcttcagtttccctcctagacacaaatcgaaaataatatactgatagctggttagtaacctcagtaagaattaaaactgaggttgtttactcattttgcctttaaatcttttatccccttttggtgaaggtttccctttaggaaaaaaggtgtcaaacaaccctgattttttttttttttgcatcatttttattacaccaaattaaagttgggagttccaagatcccattccagttaatatttaaccaaggtctaaaatttgattttttttaaatctttgaatcctcccttctgcccctcatggatccttggttttaatgatatggaaacatctaattcttagaattattccgtagcttttgctgattactctgagatttcagttaagacttgtttcaaaagacagatagctgactggttcataatacattggaatagttggatccaaactaataagaataagctgtacaggaactagtgctcaatatacattgtataaatttgtggaaatctcttggatgtgaattgttacttcaagtggcttttattaagattttctcagacttacttggaggttaaagcaaacccaaatgtgtattattttgttacagagctctgctttataattttgtaataaagtttcaatacagacaccaaaaaaaaaaaaaaaa

SEQ ID NO: 87 - DNA, 5639 bp, Homo sapiens
cttgcgcaggcgtagtgctcctgcttcctggccgagggcgggcgagcggagcctgctttcgcagcgatcgcgagcgtgtggcgattgcttctgtctgttatttagatatggaagctgaggggatgcacagaggcagccagaacctaggtcagggtctcgctcggtgctgaccgcccccggggtcgagtaggcgatgggggagcccggcttcttcgtcacaggagaccgcgccggtggccggagctggtgcctgcggcgggtggggatgagcgccgggtggctgctgctggaagatgggtgcgaggtgactgtaggacgaggatttggtgtcacataccaactggtatcaaaaatctgccccctgatgatttctcgaaaccactgtgttttgaagcagaatcctgagggccaatggacaattatggacaacaagagtctaaatggtgtttggctgaacagagcgcgtctggaacctttaagggtctattccattcatcagggagactacatccaacttggagtgcctctggaaaataaggagaatgcggagtatgaatatgaagttactgaagaagactgggagacaatatatccttgtctttccccaaagaatgaccaaatgatagaaaaaaataaggaattgagaactaaaaggaaattcagtttggatgaattagcaggtcctggagctgaaggcccctcaaatttgaaatccaaaataaataaagtgtcttgtgaatctggtcagccagtgaaatcacaggggaaaggtgaagtggccagtacaccctctgacaatttggatcctaagttgactgcccttgagccaagtaagaccacaggggctcccatttaccctggcttccccaaagtcacagaggttcatcatgagcagaaagcctcaaactcttcagcatctcagagaagcttacagatgtttaaggtgaccatgtccaggattctgaggctcaaaatacagatgcaggaaaaacatgaagccgttatgaatgtgaaaaagcagacccaaaaggggaactcaaagaaagttgtgcaaatggagcaggaacttcaggacttacagtcccagctgtgtgcagagcaggctcagcagcaggcaagagtggagcaactagagaagactttccaggaagaggaacagcatcttcagggtttggagatagcccaaggagaaaaggacctgaagcaacagctggcccaggctctgcaggagcattgggctctaatggaagagctaaatcgcagcaagaaggactttgaagcaatcattcaagccaagaacaaagaattagagcagaccaaggaagagaaggagaagatgcaagcacagaaggaagaagttcttagccacatgaatgatgtgctagagaatgagctccaatgtattatttgttcagaatacttcattgaggctgtcaccttgaactgtgcccacagtttctgctcctactgtatcaatgaatggatgaagcggaagatagaatgccccatttgtcggaaggacattaagtccaaaacgtactctttggttctggacaattgcattaataagatggtaaataatctgagctcagaagtgaaagaacgacgaattgttctcattagggaacgaaaagcaaagagattgttctgaagaccgtgctctaagggcatttgaaagactgccaggtagtgcgagcctgagatggtctggaggattctctctagccgtgactccgctgctctgaaggtcaactgagaagtcttgtgggacagagacttgagttaggaagccctcagtcacttgccttccacggtggccagccctgctgccatcattggctgaagcaccaccaggattcacggcacccaactgcttcagggtacttcgtagactctgcctcactacatgtcgaaagagttatttgagttctcttctgtttttttttaatttgttgttgttgttactgttttgatacctcggaaacacctccgttgacagttgttttggataggttgggtgtaccccatggctgcctctgaaggcagtgtctattttgagaggatggcttacctcttctttgtgaaaatactatctcatttcctggaaataaaatgtaaaacctgtcagttgctcagctgggctttggtgtatttaccttccttcccttcctgctcccagacagtctcacaagtaaacaccagcagctcatagattacaaccaagaaagtgactgtatcagatgatagacttcaagtgaatgtcagcctaagaggccaagctgcagatcgtggcaacagatgagctctgttaacctcctgactgtcgtgtttcctttttattacagaggtgggtcactgtttaccttgtttcaggggtgggagaaactcctttccttcagctggcatttgaatgtttccaaatctattttatctgacgtcatgaacacacaggcaatgattttatgacaacttgatgtgcttttttctttatttttcttttacattagaagttttctctcttttctccacctctcctttatttttaattttaattttaatttttgaaacaagatctgactctgttgcccaagctggagtacagtagtgcaatctcagctcactgcaacctccacctcccagactcaagccatcctcccacctcaacctcccaagtagctgggactacaggcatatgccatcacacccagctaatttttgtttttctgtagagacagggtttcaccatgttggccaggctggtctcaaattcctgaccttaagtgatccacctgcctaggcctctaaaatgctgggattacaggcgtgagccaccacgcccagcctataccccatgtattttcataaagggttggaaactattgattgccaactttttaaggatggtagggattttttctttgttgaatatactgtgaattttgggattctggagtccttagtcttcatttccattcttctgcccatgattactgatcaaaatactggtagagtcatggaggaagtaagttaaatgtggaaaaaatgctttaaaagtacttactataaccacatcataagaattctggaaaaatagagaacaaaaggaaaagattgttaccaccttgatttaataacttcttgtttccccatacatgtgttttgtttatagattgcatgggtatatgtcaatttttatatgttctgtgtttagtttacatattgtaattcatttttaagagagtacagacatacactttttgagtaggcaatatgttcacatagtttgaaattaaaggtacaaaatggcgtagaatgaaatgcctctcaccctttccccacagcgactacttcccactcagaggcaacaagtattacagttgcttgtatattcttccagagatctctgtctatacaagcaaaaacacatgtggtctttttccttgctttgcacaaatggtaaactgtacgctattctgaaccttgcttttttcagatatatgttggcaacagttccatgtcagtacatagtttcctttctttattacagctgcctgttttttcattgtgtatttgcaccatcatttacttttctggcttacttttgatagaaatctaggttggttcaaacctttttactcttaaaacaatgctgcagttaacacccttgtacatatatctttagagagaagatattttaaaaagaaatacctttttaaaaattattttattattttttaatagagactatgttgcctaggctggtcttgaaattctgggctaaagcaatcctaccaccttggcctcccaaagtgctgagattacaggcatgagccattgcacctggccaagaagagacatcttgacttgagcctgaagactatgtacagagactgacctcacagactgaccattccatcccacagctgctggacatagagtgatttgcagcccctcctttcagagtaccacatccctctcaagtgttccacaacatctaggaaagtgagctcttaaagacagactaaaaagagtaataaatcaatacaacaacattaaaagccagactagcggagtttgaatcttggccctgctgttagtaactgtgtgagccttgggcaagttactcagcctccttgtgtcttggttttggtttcttcatctctaagtaattatatctgtcattattgccctgatcacaaacaaaagcctgaatgtactatgtttaaaagacaaaccaaaaattaacccaaacttgcattatttgtctgagctacagaatgttctttccttggagagatatctgatattaaacatcatctgcattttacttgcctagaaaatacacggtaacttttctgccttgcagcatcaaactatagtacagctgagccccagtgctgtgcagtctgactctaattaaaggcaccttctttacagcagggctctggggaactggaaaagggggtttgtttcattatctggttttattaagcagatgaatgcagccagctatatgaagcactttgcagtgaatggcaggtgtcccatatctggttatgttaacctagaaagggctcactctacctctaggcatgtttcatcccaacaatcagactgtgccaaagcaggggactttgtcctttgtggattgcatagctggatacccatcatctgtttctctgattggaagctgctgttgtacagaaagacctgcatttcccccttgtctccagttctctcactactttttcctcctctgtgagtgaccatccaggcagtcaccataactgctggagtgtctgggattggtagctctctccaactgcctgcttgctctttacagcctctctctgtgactggaatctctccacctcatcgtatctaaggataacccagaaacatggggtgtcctaggtatgtttatctcgacactgaaccccctaggcttctgatgaatccagtgattagctaaatttgacatagaaagtaagaaggaatgtctactttgtattgtggtcctaatctaagatcaggagaatcctggaattgttatctgtctcttgctctgagatacagacttgttcataggtgtggggcctgattggaacaggatctgccattggtcacaataggtcaagggcttgttctgaaccctagttagcttcattcagagaaagaaacttcctacctggtcagctttttcagcttctccaacaaatgggagttgaggcagtaggagtgtggggttcttgggaagacgatggggccttgtattaaggagaaataatgaactatcttcttgattcttccattgagaaaagcatatgaatcctaggaaagggctcagcctgtgataggcattcaataaatactccaatgctgtcattcctttgtctacagcatccccaaacaatgtaccagtgatgggctacctgagctcatctagtcgccaagcagtatctcctgcttgctgctgctttactacattccagatgcccacctcatccaatttccagagccactatctctgctgtccactttccttcaggctctgtgaatacttcaacctgctgtgatttggggccgtttgtactctgcatgtattcaataaattcaattcagcaatagttaaaaaaaaa

SEQ ID NO: 88 - DNA, 7385 bp, Homo sapiens
aattgagctggagaggaggcagcgtgagagcagaaacttcagacgccgctgatccgggaggagctggggtgagccgcggcggccgtctctcccacccgcagcagcatcctctctgcccttctctgccaccccggggagagccgggagctgcctctttacagcttccacgagccaggggtgcaggcagctgcccccaggaagtttgggcttctgcgtagtttaggggtgcctgcgagcgccccagagggcgaggggccgagggcgatgttgggcgccgcgcggggctgggggcgcccagaagacgtgcgagtgtccgcggtcctgctgctgtctccagtaccctccgcatcccccaagtgatgggaacaagggcccgcccaggcagccgctgtcgccgcaccgccccctcgctcgctctctgcgcgcggagtcacccagtcacactcccggcaccccgagcccttcctccggagctgctgcttctactttggctgctatcgccgccgccgcgggtggcccgctgctgactgggctcgccgggagacggagaagcactttttggccctccctcagcagctctcacaccccaactttgccgccgccgccgcgcctgccctcgcagcggcgctcggccgcacattgtgggggcgcacgccgggaggctccgcaagaccgtggaggcaggaaacggcactactgcgcttctgcctcggctctttgttgttcgctttggatggttcttgaaagtgtctgagcctcctcggaaatcctggggccggagaagacaaaccttggaattcttcctctgcaaaagtctctgagatactgacaagcgtccggaaaggtcgacgagtaattgccctgaaaactcttggctaattgacccacgttgcttatattaagcctttgtgtgtggtgtgtggcttcatacatttggggaccctatttccactccctcctcttggcatgagactgtatacaggatccacccgaggacaatgattgcggagcccgctcacttttacctgtttggattaatatgtctctgttcaggctcccgtcttcgtcaggaagattttccacctcgcattgttgaacacccttcagacctgattgtctcaaaaggagaacctgcaactttgaactgcaaagctgaaggccgccccacacccactattgaatggtacaaagggggagagagagtggagacagacaaagatgaccctcgctcacaccgaatgttgctgccgagtggatctttatttttcttacgtatagtacatggacggaaaagtagacctgatgaaggagtctatgtctgtgtagcaaggaattaccttggagaggctgtgagccacaatgcatcgctggaagtagccatacttcgggatgacttcagacaaaacccttcggatgtcatggttgcagtaggagagcctgcagtaatggaatgccaacctccacgaggccatcctgagcccaccatttcatggaagaaagatggctctccactggatgataaagatgaaagaataactatacgaggaggaaagctcatgatcacttacacccgtaaaagtgacgctggcaaatatgtttgtgttggtaccaatatggttggggaacgtgagagtgaagtagccgagctgactgtcttagagagaccatcatttgtgaagagacccagtaacttggcagtaactgtggatgacagtgcagaatttaaatgtgaggcccgaggtgaccctgtacctacagtacgatggaggaaagatgatggagagctgcccaaatccagatatgaaatccgagatgatcataccttgaaaattaggaaggtgacagctggtgacatgggttcatacacttgtgttgcagaaaatatggtgggcaaagctgaagcatctgctactctgactgttcaagttgggtctgaacctccacattttgttgtgaaaccccgtgaccaggttgttgctttgggacggactgtaacttttcagtgtgaagcaaccggaaatcctcaaccagctattttctggaggagagaagggagtcagaatctacttttctcatatcaaccaccacagtcatccagccgattttcagtctcccagactggcgacctcacaattactaatgtccagcgatctgatgttggttattacatctgccagactttaaatgttgctggaagcatcatcacaaaggcatatttggaagttacagatgtgattgcagatcggcctcccccagttattcgacaaggtcctgtgaatcagactgtagccgtggatggcactttcgtcctcagctgtgtggccacaggcagtccagtgcccaccattctgtggagaaaggatggagtcctcgtttcaacccaagactctcgaatcaaacagttggagaatggagtactgcagatccgatatgctaagctgggtgatactggtcggtacacctgcattgcatcaacccccagtggtgaagcaacatggagtgcttacattgaagttcaagaatttggagttccagttcagcctccaagacctactgacccaaatttaatccctagtgccccatcaaaacctgaagtgacagatgtcagcagaaatacagtcacattatcgtggcaaccaaatttgaattcaggagcaactccaacatcttatattatagaagccttcagccatgcatctggtagcagctggcagaccgtagcagagaatgtgaaaacagaaacatctgccattaaaggactcaaacctaatgcaatttaccttttccttgtgagggcagctaatgcatatggaattagtgatccaagccaaatatcagatccagtgaaaacacaagatgtcctaccaacaagtcagggggtggaccacaagcaggtccagagagagctgggaaatgctgttctgcacctccacaaccccaccgtcctttcttcctcttccatcgaagtgcactggacagtagatcaacagtctcagtatatacaaggatataaaattctctatcggccatctggagccaaccacggagaatcagactggttagtttttgaagtgaggacgccagccaaaaacagtgtggtaatccctgatctcagaaagggagtcaactatgaaattaaggctcgccctttttttaatgaatttcaaggagcagatagtgaaatcaagtttgccaaaaccctggaagaagcacccagtgccccaccccaaggtgtaactgtatccaagaatgatggaaacggaactgcaattctagttagttggcagccacctccagaagacactcaaaatggaatggtccaagagtataaggtttggtgtctgggcaatgaaactcgataccacatcaacaaaacagtggatggttccaccttttccgtggtcattccctttcttgttcctggaatccgatacagtgtggaagtggcagccagcactggggctgggtctggggtaaagagtgagcctcagttcatccagctggatgcccatggaaaccctgtgtcacctgaggaccaagtcagcctcgctcagcagatttcagatgtggtgaagcagccggccttcatagcaggtattggagcagcctgttggatcatcctcatggtcttcagcatctggctttatcgacaccgcaagaagagaaacggacttactagtacctacgcgggtatcagaaaagtaacttaccagagaggaggcgaagctgtcagcagtggagggaggcctggacttctcaacatcagtgaacctgccgcgcagccatggctggcagacacgtggcctaatactggcaacaaccacaatgactgctccatcagctgctgcacggcaggcaatggaaacagcgacagcaacctcactacctacagtcgcccagggcagcctactccttacgccaccactcagctcatccagtcaaacctcagcaacaacatgaacaatggcagcggggactctggcgagaagcactggaaaccactgggacagcagaaacaagaagtggcaccagttcagtacaacatcgtggagcaaaacaagctgaacaaagattatcgagcaaatgacacagttcctccaactatcccatacaaccaatcatacgaccagaacacaggaggatcctacaacagctcagaccggggcagtagtacatctgggagtcaggggcacaagaaaggggcaagaacacccaaggtaccaaaacagggtggcatgaactgggcagacctgcttcctcctcccccagcacatcctcctccacacagcaatagcgaagagtacaacatttctgtagatgaaagctatgaccaagaaatgccatgtcccgtgccaccagcaaggatgtatttgcaacaagatgaattagaagaggaggaagatgaacgaggccccactccccctgttcggggagcagcttcttctccagctgccgtgtcctatagccatcagtccactgccactctgactccctccccacaggaagaactccagcccatgttacaggattgtccagaggagactggccacatgcagcaccagcccgacaggagacggcagcctgtgagtcctcctccaccaccacggccgatctcccctccacatacctatggctacatttcaggacccctggtctcagatatggatacggatgcgccagaagaggaagaagacgaagccgacatggaggtagccaagatgcaaaccagaaggcttttgttacgtgggcttgagcagacacctgcctccagtgttggggacctggagagctctgtcacggggtccatgatcaacggctggggctcagcctcagaggaggacaacatttccagcggacgctccagtgttagttcttcggacggctcctttttcactgatgctgactttgcccaggcagtcgcagcagcggcagagtatgctggtctgaaagtagcacgacggcaaatgcaggatgctgctggccgtcgacattttcatgcgtctcagtgccctaggcccacaagtcccgtgtctacagacagcaacatgagtgccgccgtaatgcagaaaaccagaccagccaagaaactgaaacaccagccaggacatctgcgcagagaaacctacacagatgatcttccaccacctcctgtgccgccacctgctataaagtcacctactgcccaatccaagacacagctggaagtacgacctgtagtggtgccaaaactcccttctatggatgcaagaacagacagatcatcagacagaaaaggaagcagttacaaggggagagaagtgttggatggaagacaggttgttgacatgcgaacaaatccaggtgatcccagagaagcacaggaacagcaaaatgacgggaaaggacgtggaaacaaggcagcaaaacgagaccttccaccagcaaagactcatctcatccaagaggatattctaccttattgtagacctacttttccaacatcaaataatcccagagatcccagttcctcaagctcaatgtcatcaagaggatcaggaagcagacaaagagaacaagcaaatgtaggtcgaagaaatattgcagaaatgcaggtacttggaggatatgaaagaggagaagataataatgaagaattagaggaaactgaaagctgaagacaaccaagaggcttatgagatctaatgtgaaaatcatcactcaagatgcctcctgtcagatgacacatgacgccagataaaatgttcagtgcaatcagagtgtacaaattgtcgtttttattcctcttattgggatatcattttaaaaactttattgggtttttattgttgttgtttgatccctaaccctacaaagagccttcctattcccctcgctgttggagcaaaccattataccttacttccagcaagcaaagtgctttgacttcttgcttcagtcatcagccagcaagagggaacaaaactgttcttttgcattttgccgctgagatatggcattgcactgcttatatgccaagctaatttatagcaagatattgatcaaatatagaaagttgatattcaacctcacaagggctctcaaagtataatctttctatagccaactgctaatgcaaattaaaacatatttcattttaacatgatttcaaaatcagtttttcatactaccctttgctggaagaaactaaaaatatagcaaatgcagaaccacaaacaattcgaatggggtagaaacattgtaaatatttactctttgcaaaccctggtggtattttattttggcttcatttcaatcattgaagtatattcttattggaaatgtacttttggataagtagggctaagccagttggatctctggttgtctagtcattgtcataagtaaacctagtaaaaccttgttctatttttcaatcatcaaaaagtaattataaatacgtattacaaacaagtggatgtttttaatgaccaattgagtaagaacatccctgtcttaactggcctaaatttcttctggtagtgtcagttcaactttcagaagtgccacttaaggaagtttgatttttgtttttgtaatgcactgtttttaatctctctctctttttttttttttttttggttttaaaagcacaatcactaaactttatttgtaaaccattgtaactattaaccttttttgtcttattgaaaaaaaaaatgttgagaagcgtttttaacctgttttgttaatgctctatgtttgtatttggaatatttgaataatgacagatggtgaagtaacatgcatactttattgtgggccatgaaccaaatggttcttacttttcctggacttaaagaaaaaaagaggtttaagtttgttgtggccaatgtcgaaacctacaagatttccttaaaatctctaatagaggcattacttgctttcaattgacaaatgatgccctctgactagtagatttctatgatccttttttgtcattttatgaatatcattgattttataattggtgctatttgaagaaaaaaatgtacatttattcatagatagataagtatcaggtctgaccccagtggaaaacaaagccaaacaaaactgaaccacaaaaaaaaaggctggtgttcaccaaaaccaaacttgttcatttagataatttgaaaaagttccatagaaaaggcgtgcagtactaagggaacaatccatgtgattaatgttttcattatgttcatgtaagaagccccttatttttagccataattttgcatactgaaaatccaataatcagaaaagtaattttgtcacattatttattaaaaatgttctcaaatacataaaaaaaaaaaaaaaaaaaaaaaaaaaaaaaaaaaaaaaaaaaaaaaaaaaaaaaa

SEQ ID NO: 89 - DNA, 3234 bp, Homo sapiens
cttgcccagactcaacatggcggctacacgtcgcctgtcagtctgtgaagcctaccccgggcgtgggccgcagcgtcgagtaacgtcattcgaaccccgtcgcgcccctttgtgcgtcacgggtggcgggcgcgggaaggggatttggattgttgcgcctctgctctgaagaaagtgctgtctggctccaactccagttctttcccctgagcagcgcctggaacctaacccttcccactctgtcaccttctcgatcccgccggcgctttagagccgcagtccagtcttggatccttcagagcctcagccactagctgcgatgcatgtgatcaagcgagatggccgccaagaacgagtcatgtttgacaaaattacatctcgaatccagaagctttgttatggactcaatatggattttgttgatcctgctcagatcaccatgaaagtaatccaaggcttgtacagtggggtcaccacagtggaactagatactttggctgctgaaacagctgcaaccttgactactaagcaccctgactatgctatcctggcagccaggatcgctgtctctaacttgcacaaagaaacaaagaaagtgttcagtgatgtgatggaagacctctataactacataaatccacataatggcaaacactctcccatggtggccaagtcaacattggatattgttctggccaataaagatcgcctgaattctgctattatctatgaccgagatttctcttacaattacttcggctttaagacgctagagcggtcttatttgttgaagatcaatggaaaagtggctgaaagaccacaacatatgttgatgagagtatctgttgggatccacaaagaagacattgatgcagcaattgaaacatataatcttctttctgagaggtggtttactcatgcttcgcccactctcttcaatgctggtaccaaccgcccacaactttctagctgttttcttctgagtatgaaagatgacagcattgaaggcatttatgacactctaaagcaatgtgcattgatttctaagtctgctggaggaattggtgttgctgtgagttgtattcgggctactggcagctacattgctgggactaatggcaattccaatggccttgtaccgatgctgagagtatataacaacacagctcgatatgtggatcaaggtgggaacaagcgtcctggggcatttgctatttacctggagccttggcatttagacatctttgaattccttgatttaaagaagaacacaggaaaggaagagcagcgtgccagagatcttttctttgctctttggattccggatctcttcatgaaacgagtggagactaatcaggactggtctttgatgtgtccaaatgagtgtcctggtctggatgaggtttggggagaggaatttgagaaactatatgcaagttatgagaaacaaggtcgtgtccgcaaagttgtaaaagctcagcagctttggtatgccatcattgagtctcagacggaaacaggcaccccgtatatgctctacaaagattcctgtaatcgaaagagcaaccagcagaacctgggaaccatcaaatgcagcaacctgtgcacagaaatagtggagtacaccagcaaagatgaggttgctgtttgtaatttggcttccctggccctgaatatgtatgtcacatcagaacacacatacgactttaagaagttggctgaagtcactaaagtcgttgtccgaaacttgaataaaattattgatataaactactatcctgtaccagaggcatgcctatcaaataaacgccatcgccccattggaattggggtacaaggtctggcagatgcttttatcctgatgagatacccttttgagagtgcagaagcccagttactgaataagcagatctttgaaactatttattatggtgctctggaagccagctgtgaccttgccaaggagcagggcccatacgaaacctatgagggctctccagttagcaaaggaattcttcagtatgatatgtggaatgttactcctacagacctatgggactggaaggttctcaaggagaagattgcaaagtatggtataagaaacagtttacttattgccccgatgcctacagcttccactgctcagatcctggggaataatgagtccattgaaccttacaccagcaacatctatactcgcagagtcttgtcaggagaatttcagattgtaaatcctcacttattgaaagatcttaccgagcggggcctatggcatgaagagatgaaaaaccagattattgcatgcaatggctctattcagagcataccagaaattcctgatgacctgaagcaactttataaaactgtgtgggaaatctctcagaaaactgttctcaagatggcagctgagagaggtgctttcattgatcaaagccaatctttgaacatccacattgctgagcctaactatggcaaactcactagtatgcacttctacggctggaagcagggtttgaagactgggatgtattatttaaggacaagaccagcggctaatccaatccagttcactctaaataaggagaagctaaaagataaagaaaaggtatcaaaagaggaagaagagaaggagaggaacacagcagccatggtgtgctctttggagaatagagatgaatgtctgatgtgtggatcctgaggaaagacttggaagagaccagcatgtcttcagtagccaaactacttcttgagcatagataggtatagtgggtttgcttgaggtggtaaggctttgctggaccctgttgcaggcaaaaggagtaattgatttaaagtactgttaatgatgataatgattttttttttaaactcatatattgggattttcaccaaaataatgcttttgaaaaaaagaaaaaaaaaacggatatattgagaatcaaagtagaagttttaggaatgcaaaataagtcatcttgcatacagggagtggttaagtaaggtttcatcacccctttagcactgcttttctgaagacttcagttttgttaaggagatttagttttactgctttgactggtgggtctctagaagcaaaactgagtgataactcatgagaagtactgataggacctttatctggatatggtcctataggttattctgaaataaagataaacatttctaagtgaaaaaaaaaaaaaaaaaaaaaaaaaaaaaaaaaaaaaaaaaaaa

SEQ ID NO: 90 - DNA, 4255 bp, Homo sapiens
agaggtgaaggggcgggcacccggcggccaggagagagagggagggcgccacgcaccggactgcgggccgagagcgcgcacgccgcgctccgcccctgctgccgcccccgtcgccgccgccgccgccgccgcagcttgggaggtgctgccaccacaggtacctgcacatgttgttctttgtcagtgctgtcaagtgtgtgccagggtgatccatggtcactttccgggatggcagcaaggtgacttcggctgaggatgaccctgactgaaaggctgcgtgagaagatatctcgggccttctacaaccatgggctcctctgtgcatcctatcccatccccatcatcctcttcacagggttctgcatcttagcctgctgctacccactgctgaaactccccttgccaggaacaggacctgtggaattcaccacccctgtgaaggattactcgcccccacctgtggactctgaccgcaaacaaggagagcctactgagcagcctgagtggtatgtgggtgccccggtggcttatgtccagcagatatttgtgaagtcctcagtgtttccctggcacaagaacctcctggcagtagatgtatttcgttcacctttgtcccgggcattccaactggtggaggagatccggaaccacgtgctgagagacagctctgggatcaggagcttggaggagttgtgtctgcaagtgaccgacctgctgccaggccttaggaagctcaggaacctactccctgagcatggatgcctgctgctgtcccctgggaacttctggcagaatgactgggaacgcttccatgctgatcctgacatcattgggaccatccaccagcacgagcctaaaaccctgcagacttcagccacactcaaagacttgttatttggtgttcctgggaagtacagcggggtgagcctctacaccaggaagaggatggtctcctacaccatcaccctggtcttccagcactaccatgccaagttcctgggcagcctgcgtgcccgcctgatgcttctgcaccccagccccaactgcagccttcgggcggagagcctggtccacgtgcacttcaaggaggagattggtgtcgctgagctcatcccccttgtgaccacctacatcatcttgtttgcctacatctacttctccacgcggaagatcgacatggtcaagtccaagtgggggctggccctggctgccgtggtcacagtgctcagctcgctgctcatgtctgtgggactctgcacactcttcggcctgacgcccaccctcaatggcggcgagattttcccctaccttgtggtggttattgggttagagaatgtgttggtgctcaccaagtctgtggtctcaaccccggtagacctggaggtgaagctgcggatcgcccaaggcctaagcagcgagagctggtccatcatgaagaacatggccacggagctgggcatcatcctcatcggctacttcaccctagtgcccgccatccaggagttctgtctctttgctgtcgtggggctggtgtctgacttcttccttcagatgctgtttttcaccactgtcctgtccattgacattcgccggatggagctagcagacctgaacaagcgactgccccctgaggcctgcctgccctcagccaagccagtgggacagccaacgcgctacgagcggcagctggctgtgaggccgtccacaccccacaccatcacgttgcagccgtcttccttccgaaacctgcggctccccaagaggctgcgtgttgtctacttcctggcccgcacccgcctggcacagcgcctcatcatggctggcaccgttgtctggattggcatcctggtatacacagacccagcagggctgcgcaactacctcgctgcccaggtgacggaacagagcccattgggtgagggagccctggctcccatgcccgtgcctagtggcatgctgccccccagccacccggaccctgccttctccatcttcccacctgatgcccctaagctacctgagaaccagacgtcgccaggcgagtcacctgagcgtggaggtccagcagaggttgtccatgacagcccagtcccagaggtaacctgggggcctgaggatgaggaactttggaggaaattgtccttccgccactggccgacgctcttcagctattacaacatcacactggccaagaggtacatcagcctgctgcccgtcatcccagtcacgctccgcctgaacccgagggaggctctggagggccggcaccctcaggacggccgcagtgcctggcccccaccggggcccatacctgctgggcactgggaagcaggacccaagggcccaggtggggtgcaggcccatggagacgtcacgctgtacaaggtggcggcgctgggcctggccaccggcatcgtcttggtgctgctgctgctctgcctctaccgcgtgctatgcccgcgcaactacgggcagctgggtggtgggcccgggcggcggaggcgcggggagctgccctgcgacgactacggctatgcgccacccgagacggagatcgtgccgcttgtgctgcgcggccacctcatggacatcgagtgcctggccagcgacggcatgctgctggtgagctgctgcctggcaggccacgtctgcgtgtgggacgcgcagaccggggattgcctaacgcgcattccgcgcccaggcaggcagcgccgggacagtggcgtgggcagcgggcttgaggctcaggagagctgggaacgactttcagatggtgggaaggctggtccagaggagcctggggacagccctcccctgagacaccgcccccggggccctccgccgccttccctcttcggggaccagcctgacctcacctgcttaattgacaccaacttttcagcgcagcctcggtcctcacagcccactcagcccgagccccggcaccgggcggtctgtggccgctctcgggactccccaggctatgacttcagctgcctggtgcagcgggtgtaccaggaggaggggctggcggccgtctgcacaccagccctgcgcccaccctcgcctgggccggtgctgtcccaggcccctgaggacgagggtggctcccccgagaaaggctccccttccctcgcctgggcccccagtgccgagggttccatctggagcttggagctgcagggcaacctcatcgtggtggggcggagcagcggccggctggaggtgtgggacgccattgaaggggtgctgtgctgcagcagcgaggaggtctcctcaggcattaccgctctggtgttcttggacaaaaggattgtggctgcacggctcaacggttcccttgatttcttctccttggagacccacactgccctcagccccctgcagtttagagggaccccagggcggggcagttcccctgcctctccagtgtacagcagcagcgacacagtggcctgtcacctgacccacacagtgccctgtgcacaccaaaaacccatcacagccctgaaagccgctgctgggcgcttggtgactgggagccaagaccacacactgagagtgttccgtctggaggactcgtgctgcctcttcacccttcagggccactcaggggccatcacgaccgtgtacattgaccagaccatggtgctggccagtggaggacaagatggggccatctgcctgtgggatgtactgactggcagccgggtcagccatgtgtttgctcaccgtggggatgtcacctcccttacctgtaccacctcctgtgtcatcagcagtggcctggatgacctcatcagcatctgggaccgcagcacaggcatcaagttctactccattcagcaggacctgggctgtggtgcaagcttgggtgtcatctcagacaacctgctggtgactggcggccagggctgtgtctccttttgggacctaaactacggggacctgttacagacagtctacctggggaagaacagtgaggcccagcctgcccgccagatcctggtgctggacaacgctgccattgtctgcaactttggcagtgagctcagcctggtgtatgtgccctctgtgctggagaagctggactgagcgcagggcctccttgcccaggcaggaggctggggtgctgtgtgggggccaatgcactgaacctggacttgggggaaagagccgagtatcttccagccgctgcctcctgactgtaataatattaaacttttttaaaaaaccatatcatcatctgtcaggc

SEQ ID NO: 91 - DNA, 2071 bp, Homo sapiens
agtggctcgtgggagccaagatggcggcggcggcggcagcgacagcagcagcagcagccagtattcgggaaaggcagacaggtactgacttattctcttctccttgaagcttcgtgactgccccgacgacatccttctcctctggcttttacactctgatcgagatcctattccagatgttcctgcagtatactttgtaatgccaactgaagaaaatattgacagaatgtgccaggatcttcgaaatcaactatatgaatcatattatttaaattttatttctgctatttcaagaagtaaactggaagatattgcaaatgcagcgttagcagctagtgcagtaacacaagtagccaaggtttttgaccaatatctcaattttattactttggaagatgatatgtttgtattatgtaatcaaaataaggagcttgtttcatatcgtgccattaacaggccagatatcacagacacggaaatggaaactgttatggacactatagttgacagcctcttctgcttttttgttactctgggtgctgttcctataatcagatgttcaagaggaacagcagcagaaatggtagcagtgaaactagacaagaaacttcgagaaaatctaagagatgcaagaaacagtctttttacaggtgatacacttggagctggccaattcagcttccagaggcccttattagtccttgttgacagaaacatagatttggcaactcctttacatcatacttggacatatcaagcattggtgcacgatgtactggatttccatttaaacagggttaatttggaagaatcttcaggagtggaaaactctccagctggtgctagaccaaagagaaaaaacaagaagtcttatgatttaactccggttgataaattttggcaaaaacataaaggaagtccattcccagaagttgcagaatcagttcagcaagaactagaatcttacagagcacaggaagatgaggtcaaacgacttaaaagcattatgggactagaaggggaagatgaaggagccataagtatgctttctgacaataccgctaagctaacatcagctgttagttctttgccagaactccttgagaaaaaaagacttattgatctccatacaaatgttgccactgctgttttagaacatataaaggcaagaaaattggatgtatattttgaatatgaagaaaaaataatgagcaaaactactctggataaatctcttctagatataatatcagaccctgatgcaggaactccagaagataaaatgaggttgtttcttatctattatataagcacacagcaagcaccttctgaggctgatttggagcaatataaaaaagctttaactgatgcaggatgcaaccttaatcctttacaatatatcaaacagtggaaggcttttaccaagatggcctcagctccggccagctatggcagcactaccactaaaccaatgggtcttttatcacgagtcatgaatacaggatcacagtttgtgatggaaggagtgaagaacctggttttgaaacagcaaaatctacctgttactcgtattttggacaatcttatggagatgaagtcaaaccccgaaactgatgactatagatattttgatcccaaaatgctgcggggcaatgacagctcagttcccagaaataaaaatccattccaagaggccattgtttttgtggtgggaggaggcaactacattgaatatcagaatcttgttgactacataaaggggaaacaaggcaaacacattttatatggctgcagtgagctttttaatgctacacagttcataaaacagttgtcacaacttggacaaaagtaacacagaagaaccttactatgataatctacttggaatgtggataaatgtaaaaagaagaaaagttagaagagcaatatgtttccttctctgtaacagtgtcctaacagtgaaaatcagagttatttgttaatttttaaggaaattatatacttaatatgtattgattaaaagaaacatttcagaaataaaatttcaacattgttcattttctctgataaa

SEQ ID NO: 92 - DNA, 3217 bp, Homo sapiens
ggccgggagacctggcggagctgggggtggggggccagtttttgcaacggctaaggaagggcctgtgggtttattataaggcggagctcggcgggagaggtgcgggccgaatccgagccgagcggagaggaatccggcagtagagagcggactccagccggcggaccctgcagccctcgcctgggacagcggcgcgctgggcaggcgcccaagagagcatcgagcagcggaacccgcgaagccggcccgcagccgcgacccgcgcagcctgccgctctcccgccgccggtccgggcagcatgaggcgcgcggcgctctggctctggctgtgcgcgctggcgctgagcctgcagccggccctgccgcaaattgtggctactaatttgccccctgaagatcaagatggctctggggatgactctgacaacttctccggctcaggtgcaggtgctttgcaagatatcaccttgtcacagcagaccccctccacttggaaggacacgcagctcctgacggctattcccacgtctccagaacccaccggcctggaggctacagctgcctccacctccaccctgccggctggagaggggcccaaggagggagaggctgtagtcctgccagaagtggagcctggcctcaccgcccgggagcaggaggccaccccccgacccagggagaccacacagctcccgaccactcatcaggcctcaacgaccacagccaccacggcccaggagcccgccacctcccacccccacagggacatgcagcctggccaccatgagacctcaacccctgcaggacccagccaagctgaccttcacactccccacacagaggatggaggtccttctgccaccgagagggctgctgaggatggagcctccagtcagctcccagcagcagagggctctggggagcaggacttcacctttgaaacctcgggggagaatacggctgtagtggccgtggagcctgaccgccggaaccagtccccagtggatcagggggccacgggggcctcacagggcctcctggacaggaaagaggtgctgggaggggtcattgccggaggcctcgtggggctcatctttgctgtgtgcctggtgggtttcatgctgtaccgcatgaagaagaaggacgaaggcagctactccttggaggagccgaaacaagccaacggcggggcctaccagaagcccaccaaacaggaggaattctatgcctgacgcgggagccatgcgccccctccgccctgccactcactaggcccccacttgcctcttccttgaagaactgcaggccctggcctcccctgccaccaggccacctccccagcattccagcccctctggtcgctcctgcccacggagtcgtggggtgtgctgggagctccactctgcttctctgacttctgcctggagacttagggcaccaggggtttctcgcataggacctttccaccacagccagcacctggcatcgcaccattctgactcggtttctccaaactgaagcagcctctccccaggtccagctctggaggggagggggatccgactgctttggacctaaatggcctcatgtggctggaagatcctgcgggtggggcttggggctcacacacctgtagcacttactggtaggaccaagcatcttgggggggtggccgctgagtggcaggggacaggagtccactttgtttcgtggggaggtctaatctagatatcgacttgtttttgcacatgtttcctctagttctttgttcatagcccagtagaccttgttacttctgaggtaagttaagtaagttgattcggtatccccccatcttgcttccctaatctatggtcgggagacagcatcagggttaagaagactttttttttttttttttaaactaggagaaccaaatctggaagccaaaatgtaggcttagtttgtgtgttgtctcttgagtttgtcgctcatgtgtgcaacagggtatggactatctgtctggtggccccgtttctggtggtctgttggcaggctggccagtccaggctgccgtggggccgccgcctctttcaagcagtcgtgcctgtgtccatgcgctcagggccatgctgaggcctgggccgctgccacgttggagaagcccgtgtgagaagtgaatgctgggactcagccttcagacagagaggactgtagggagggcggcaggggcctggagatcctcctgcagaccacgcccgtcctgcctgtggcgccgtctccaggggctgcttcctcctggaaattgacgaggggtgtcttgggcagagctggctctgagcgcctccatccaaggccaggttctccgttagctcctgtggccccaccctgggccctgggctggaatcaggaatattttccaaagagtgatagtcttttgcttttggcaaaactctacttaatccaatgggtttttccctgtacagtagattttccaaatgtaataaactttaatataaagtagtcctgtgaatgccactgccttcgcttcttgcctctgtgctgtgtgtgacgtgaccggacttttctgcaaacaccaacatgttgggaaacttggctcgaatctctgtgccttcgtctttcccatggggagggattctggttccagggtccctctgtgtatttgcttttttgttttggctgaaattctcctggaggtcggtaggttcagccaaggttttataaggctgatgtcaatttctgtgttgccaagctccaagccccatcttctaaatggcaaaggaaggtggatggccccagcacagcttgacctgaggctgtggtcacagcggaggtgtggagccgaggcctaccccgcagacaccttggacatcctcctcccacccggctgcagaggccagaggcccccagcccagggctcctgcacttacttgcttatttgacaacgtttcagcgactccgttggccactccgagaggtgggccagtctgtggatcagagatgcaccaccaagccaagggaacctgtgtccggtattcgatactgcgactttctgcctggagtgtatgactgcacatgactcgggggtggggaaaggggtcggctgaccatgctcatctgctggtccgtgggacggtgcccaagccagaggctgggttcatttgtgtaacgacaataaacggtacttgtcatttcgggcaaaaaaaaaaaaaaaaaa

SEQ ID NO: 93 - DNA, 3447 bp, Homo sapiens
gagcatacgtcatcgttctcgctttccggtagctaaggcgatcagcgggacttcccactgagacgagcggatgtcatattgtatcagggcgaacctctgaggagcgctggctgcgcttaggcaacggtgcggcaggcgccggggttttctgaaacagaaacgtttaggggtggggaaacgtgttccgaggaactctcgttttgaagtgcgacatacacctgtcttgccctgttccaagatggtggcagagcttctctgagtctctcgcttcctccagtccgtcggagaagcgctctttgattggccagtggacagcgccgtggcatgacgcgctggggcgctggccaatcggttgagagctgagctggacttggcggtgggagccggagcctgcttgttgcagctgtgggtgaggacggctctagctaggtgagcggctccggccagttcccttttagactatggcgacatacctggagttcatccagcagaatgaagaacgggatggtgtgcgttttagttggaacgtgtggccttccagccggctggaggctacaagaatggttgtacccctggcttgtctccttactcctttgaaagaacgtccagacctacctcctgtacaatatgaacctgtgctttgcagcaggccaacttgtaaagctgttctcaacccactttgtcaggttgattatcgagcaaaactttgggcctgtaatttctgttttcaaagaaatcagtttcctccagcttatggaggcatatctgaggtgaatcaacctgccgaattgatgccccagttttctacaattgagtacgtgatacagcgaggtgctcagtcccctctgatctttctctatgtggttgacacatgcctggaggaagatgaccttcaagcactcaaagagtccctgcagatgtccctgagtcttcttcctccagatgctctggtgggtctgatcacatttggaaggatggtgcaggttcatgagctaagctgtgaaggaatctccaaaagttatgtcttccgagggaccaaggatttaactgcaaagcaaatacaggatatgttgggcctgaccaagccagccatgcccatgcagcaagcacgacctgcacaaccacaggagcacccttttgcttcaagcagatttctgcagcctgttcacaagattgatatgaacctcactgatcttcttggggagctacagagggacccatggccagtaactcaggggaagagacctttgcgatccactggtgtggctttgtccattgctgttggcttgctggagggcacttttccaaacacaggagccaggatcatgctgtttactggaggtccccctacccaagggcctggcatggtggttggagatgaattaaagattcctattcgttcttggcatgatattgagaaagataatgcacgattcatgaaaaaggcaaccaagcactatgagatgcttgctaatcgaacagctgcaaatggtcactgcattgatatttatgcttgtgcccttgatcaaactggacttttggagatgaagtgttgtgcaaatcttactggaggctacatggtaatgggagattctttcaacacttctctcttcaagcagacattccaaagaatctttactaaagattttaatggagatttccgaatggcatttggtgctactttggacgtaaagacctctcgggaactgaagattgcaggagccattggtccatgcgtatctctgaatgtgaaaggaccgtgtgtgtcagaaaatgagcttggtgttggtggcacgagtcagtggaaaatctgtggcctagatcctacatctacacttggcatctattttgaagttgtcaatcagcacaacaccccgatcccccaaggaggcagaggagccatccagtttgtcacgcattatcagcactccagcacccagagacgcatccgcgtgaccaccatcgcccgaaattgggcagatgtacagagtcagctcaggcacatagaagcagcatttgaccaggaggctgcggcagtgttgatggcacggcttggggtgttccgagcggagtcagaggaggggcccgatgtgctccggtggctggaccgacaactcatccgactgtgtcaaaagtttggacagtataacaaagaagaccccacttcttttaggttatcagattccttttctctatatcctcagtttatgttccatctgagaagatctccatttcttcaagtgtttaacaacagtcctgatgagtcgtcatattacagacatcattttgcccggcaggacctgacccagtccctcatcatgatccagcccattctctactcttactcctttcatgggccaccagagccagtactcttggatagcagcagcattctagctgacagaattttgctgatggatactttctttcaaattgtcatttatcttggtgagaccatagcccagtggcgtaaagctggctaccaggacatgcccgagtatgaaaacttcaagcaccttctgcaggcaccactggatgatgctcaagaaattctgcaagcacgcttcccgatgccacgttacatcaacacggagcatggaggcagtcaggctcgattccttttgtccaaagtgaacccatctcagacacacaataacctgtatgcttggggacaggaaactggagcacccatcctaactgatgatgttagcctgcaggtgttcatggaccatttgaagaagctggctgtctccagtgcctgttaagctgaggatacaaccaggaaatgcaacggtgtcagattgtgttcaaaatgtctagaaaggcttgataacattcctgttacttttctagcagattttaacaaataatcaaggacattttatatgtaactctttagattataatttatttgtattcctgtctttgtcctttttcttgcactataaaattataaggtcataaatgttttggtacttgtagatgtttatgtgctttttgtatcctaacttttagaatctaaataaaatcagaggtaatgtattttggcagcttgtttaggtgagaatcttaatgatcataaaggaaataaatctagatgcagaaagtactggctaaaatattgctaatacaaatgtgatttcctgaggtctctgtgtgagtgtgtatgtgttttaagtgacttccttaagaggtgtttcctgaacctaattctcataattaaagtaatgtatatgcaggatcaaaatgaaacaaatataccttatcctaaagagctcataacaaataagttacctccactctataaactcagacctactttttgaagataactgcttttaacctctccttacaagatttttgttgttgatgtatttaattttagcccatgtctcaattctcattttcaaagaatcaatatattaatatacaaaaaaaaaaaaaaaa

SEQ ID NO: 94 - DNA, 1699 bp, Homo sapiens
agtttcccggcccgcacggggcgggctgggggcggggcctggctcggaccacgcggggcgggacctggagctgacgcggccgccccgcccctgggaccataaccggccgccgccgccaccgcggaccgagcgcggagttctggagtctcggacccgaagccgccacagggcgccccgcctcccgcccgccatgcccgcgccccgcgccccgcgcgctctggcggccgccgcgcccgcgtccgggaaggccaagctgacgcacccggggaaggcgatcctggcaggcggcctggcgggtggcatcgagatctgcatcaccttccccaccgagtacgtgaagacgcagctgcagctggacgagcgctcgcacccgccgcggtaccggggcatcggggactgcgtgcggcagacggttcgcagccatggcgtcctgggcctgtaccgcggccttagctccctgctctacggttccatccccaaggcggccgtcaggtttggaatgttcgagttcctcagcaaccacatgcgggatgcccagggacggctggacagcacgcgtgggctgctgtgcggcctgggcgctggcgtggccgaggccgtggtggtcgtgtgccccatggagaccatcaaggtgaagttcatccacgaccagacctccccaaaccccaagtacagaggattcttccacggggttagggagattgtgcgggaacaagggctgaaggggacgtaccagggcctcacagccactgtcctgaagcagggctcgaaccaggccatccgcttcttcgtcatgacctccctgcgcaactggtaccgaggggacaaccccaacaagcccatgaaccctctgatcactggggtcttcggagctattgcaggcgcagccagtgtctttggaaacactcctctggatgtgattaagacccggatgcagggcctggaggcgcacaaataccggaacacgtgggactgcggcttgcagatcctgaagaaggaggggctcaaggcattctacaagggcactgtcccccgcctgggccgggtctgcctggatgtggccatagtgtttgtcatctatgatgaagtggtgaagctgctcaacaaagtgtggaagacggactaagcctagagaggccgcaaggggaccgccccaggcaccgccagagtgtcctgctacctttgtctcacgattccagtgcagtagtgccaaaaggccccttcccacgtccctcgagctctgtagcctggtctgtgcattgtggctgtcaaatccatgtgtcccccctgtggtctgtgtgtgacaccaccactgtgtcccagtgtctggcccagccatggctggatgtgcatctggcctatgaccctgtgcctgtgtttcatgttctgtgtcacgtgaccctgtgccccgcctcccggggtgcccgtgtggcctgggtcctcggccctgtagccctggcccggtcccagtccggtgccttccaccctgccctggcctaccacagctgcctccgggcctcggcctggcttcaccgcattccaggggctgcagccccctgcttctcccgccattggccttaactggccctcgggccctctctccgccccggacagggtggcacccaccactctcaggaccaccctgccaaggcagaataaaccggatcctgttgcagcctccaaaaaaaaaaaaaaaaaa

SEQ ID NO: 95 - DNA, 6692 bp, Homo sapiens
tggccaagggcggggcccgcgagggaggccgggcggcccggcaagcggcgctgcggggtaggctgctttcctgaggccggactcaacgggtctcggctgagccaccgggtgagctcaccgcccagcccaaaccaggagattgcgagggagcgatgcggtgcagcgcgatttgcttgtaaatgcatcacgaagaggcagcccagaatgaagaaagcaagcaggagtgttggctcagtgcctaaagtgtctgcaataagtaaaacgcaaacagcagaaaaaattaaacctgaaaacagctcttcagcatctacgggaggcaaacttgtaaaacctggaacagcagcatcattgtcaaagaccaagagcagtgatgaccttttagctggaatggccggaggggtaacggtgactaatggtgttaaaggaaagaaaagcacctgcccatctgcagcaccttcagcatctgcccctgccatgaccaccgtggagaacaaatccaagattagcacaggcacagcttcttcaaccaagcggagcacttctacaggtaataaagaatccagttctactagagaaagattacgtgaacgtacccgattaaaccagagcaaaaaactaccttctgcaggtcagggagctaatgacatggcattggccaaacgttcccgcagtcgaactgctacagaatgtgacgttcgtatgagcaagtctaagtcagacaatcagatcagtgacagagctgctttggaggccaaagtgaaggatcttctcacgctggcaaaaaccaaagacgtagaaattttacatttgagaaatgaactgcgagacatgcgtgcccagctgggcattaatgaggatcattctgagggtgatgaaaaatctgagaaggaaactattatggctcaccagccgactgatgtggagtccactttattgcagttgcaggaacagaatactgccatccgtgaagaactcaaccagctgaaaaatgaaaacagaatgttaaaggacaggttgaatgcattgggcttttccctagagcagaggttagacaattctgaaaaactgtttggctatcagtccctgagcccagaaatcacccctggtaaccagagcgatggaggaggaactctgacttcttcagtggaaggctctgcccctggctcagtggaggatctcttgagtcaggatgaaaatacactaatggaccatcagcacagtaactccatggacaatttagacagtgagtgcagtgaggtctaccagcccctcacatcgagcgatgatgcgctggatgcaccatcctcctcagagtcggaaggcatccccagcatagagcgctcccggaaggggagcagcgggaatgccagtgaagtgtccgtggcttgcctgactgaacggatacaccagatggaagagaaccaacacagtacaagtgaggaactccaggcaaccctgcaagagctagctgatttacagcagattacccaggaactgaatagtgaaaacgaaaggcttggagaagagaaggttattctgatggagtctttatgtcagcagagcgataagttggaacactttagtcgacagattgaatacttccgctctcttctagatgagcatcacatttcttatgtcatagatgaagatgtaaaaagtgggcgctatatggaattagagcaacgttacatggacctcgctgagaatgcccgttttgaacgggagcagcttcttggtgtccagcagcatttaagcaatactttgaaaatggcagaacaagacaataaggaagctcaagaaatgataggggcactcaaagaacgcagtcaccatatggagcgaattattgagtctgagcagaaaggaaaagcagccttggcagccacgttagaggaatacaaagccacagtggccagtgaccagatagagatgaatcgcctgaaggctcagctggagaatgaaaagcagaaagtggcagagctgtattctatccataactctggagacaaatctgatattcaggacctcctggagagtgtcaggctggacaaagaaaaagcagagactttggctagtagcttgcaggaagatctggctcatacccgaaatgatgccaatcgattacaggatgccattgctaaggtagaggatgaataccgagccttccaagaagaagctaagaaacaaattgaagatttgaatatgacgttagaaaaattaagatcagacctggatgaaaaagaaacagaaaggagtgacatgaaagaaaccatctttgaacttgaagatgaagtagaacaacatcgtgctgtgaaacttcatgacaacctcattatttctgatctagagaatacagttaaaaaactccaggaccaaaagcacgacatggaaagagaaataaagacactccacagaagacttcgggaagaatctgcggaatggcggcagtttcaggctgatctccagactgcagtagtcattgcaaatgacattaaatctgaagcccaagaggagattggtgatctaaagcgccggttacatgaggctcaagaaaaaaatgagaaactcacaaaagaattggaggaaataaagtcacgcaagcaagaggaggagcgaggccgggtatacaattacatgaatgccgttgagagagatttggcagccttaaggcagggaatgggactgagtagaaggtcctcgacttcctcagagccaactcctacagtaaaaaccctcatcaagtcctttgacagtgcatctcaagtaccaaaccctgctgcagctgcaattcctcgaacgcccctgagcccaagtcctatgaaaacccctcctgcagcagctgtgtcccctatgcagagacattccataagtggaccaatctcaacatccaaacccctgacagccctgtcagataagagaccaaactatggggaaatccctgttcaagagcatctgttaagaacatcttcagccagccggcctgcttccctgccaagagtgcctgcgatggaaagtgccaagaccctctcagtgtctcgacgaagtagtgaagaaatgaaacgggacatttctgcacaggagggagcgtcgccagcctctctgatggctatgggaaccacgtctccacagctttccctgtcctcttctccaacggcatctgtgactcccaccacccgaagccgaataagagaagaaaggaaagaccctctctcagcattggccagagaatatggaggatcaaagaggaacgccttgctgaagtggtgtcagaagaaaacagaaggctatcagaatattgacattacaaacttcagcagcagctggaatgatgggctggccttctgtgccctcctgcatacatatctccctgcccacattccatatcaagaactgaacagccaggataagagaaggaacttcatgctggctttccaggcagctgaaagtgtcggcatcaaatccacactggacattaatgaaatggtacggactgaacgacccgactggcagaacgtgatgctgtatgtgacggcgatctacaagtactttgagacctgagcatgccgggaggagccgccccaatagcgggggtacccctccacagcgaccgagcgacaccgacgccattagctacgcacccctgtaaagcttccagcaactctgggctgccccacagcgtgtgagcctccagctcggggcttccgtattggaagaactcagccgtgtggcccacagctcccaccagggcccctcccacatgacccgtccattcaggtcatgtgggctcagcacacatcctgcaggccggtggctgctggagttttccttctgaagagaatattgaactacactagtgctccagggcaccaaacaaaaagggctcatgcacagctgaatttgggaaaagggattcagttctgtgggaaactcactagggttgatgaaggctcggccgcggcacttcctgactattggctggggtgggttccggtgctggtgagaacccagaaggagagtcagcgcctggcagttcccagcgccctgggcccttcaccgtcctagtttggaggagcatgttcaccacagacgtgggtcagctgccccacacctgacggggctgtcccggccgacacaatccaggcgtgttcagcctgagctaggagagtatctagagggcgtggtgcgggcacgccagggctggggtgctgctgctgcactcacgcggctgggctttctggcgggaagcagttacgggggccccttgcctggactcagcgacctgtcttccagcctggaaggggtttggagtcccagctctggctttagatttcttcatcataaggagtttttctagttaacatttttgttttgttacgagcaatgctggaaaaggtcgctcctgttctgttagtaccaaagttacattgtttcaataagcatagaaatctaaacaacatctgtacattagcatggtgagagcaaggaataaagcaggaaataggagaaaagtaaacaactttagggagcccaggcagtgtcatttaaactcactgagtcactaagacataattctcctaggccagagttaaagaaagtgccttaactcttcttgtgagggcagccactgccctccgtggccaaggcaggacctccaagactcagtggttgagttgtctcctaccaccatgcccgccctccccaggtactgggtccatgccccctgtgcccaccctccccaggtgctgggtccatgctgtttgaaccaaagccttatttaaaggtggtcactggagatgctctcaggccagaactcaacagctatttttgggaatagggatctcccgtgtgcctaacgcagtagctattggtttgaacaatgtccagacaagacctgtacctttgagaatataactgtgtttggcacctgcatagcaccatgaggaagaccagccaccagtggaagcggggtcactgccccacagactggatgcaatgaggggctcacaggaggcccagccagcccgattgtgggctgaggggtctgcattcaagcacgatgttctagaataggagtttaacgtgtctacgtaacctagaatgtggttattaggaaaggggctgtgcatgtgggtgcagctggcggcacacctggtcaccagatggccagaagctgcccatcagccctgcccagatgtcagcctgggagctcaggctgctgccgctggctggatgccctttggtgaaatgcctgttttcagctaagaaaggagaggccaggcaagcaaagtcatgccacaaagcatatcagagacccccgcagactcctggccccgtcccgccccctgtctgagttgtgtttttgttgctgttcctctgttgatggccagctctgctgttggcatgagccactgatgttcatgtgagaattactgtttttaagtgtctctccacttaggtgtcctcagttcccacttttgctctcatttgccttcacagaggccactccacctgtccggatccagctgtctggtcatggtttggtttatttattttgtccttcaggggctgttttgccctaagaatgagggggcttcccctggtctgcagttcccaactttatcccttgctggccatgcgagcccagccctggtgcctcatgggatgggggggtaggggtccccaggatcttctggaggaaggtggccatggatggatgggctgtatctgtgttttccctctgggagtctcatgggtccagcatcaggcctgaggtcagcaacagggaaagagggtgggcacggggagggcttggccccgcctatctagaggcttgcctcgggcccctccttggggaaggtttgcgtgcagagctgcaagggagagggttccagaagcattgccttttgcctcgtctaataggatccttaggacactgtgggctttaggaatgactatagatgctcacacgtgtttaaagtgacatttggagatgctctcagtcctgtggcatctggcacgaagtctccaagaagccactttgcctcttctcccttcaagcacaagctttactgcaaaagggccagtcgcgtttctatttctctcgatcccaggcttctgcggaccgacgatacgtttaaatgttgttctagtaaatattcttgaatgtattaaaatggctgaaacaacaagcttgggcttttctagcttgccctccactccctgccgtccctctgacgtcgcataaaccagaacccagctccctcctgggactggctgtggagagaagggcacctctgagccagcctgtggccctaccccaaggcgcacttcctcatgtgggcagatcctgaccaggagtccagggtggcctcccctgggccacagcacatcaccgtgtggcctggggctgtgggacagtgagccctgtaaccactagggttctgtgacagatgccaagaccccagagaccgtggcagagctacccccaggagagcggaagcccctacacagcccagacacatgccttccctgggggctggggagtgtgtctcgaggggttttgtttgttttgaggcatgtatcatcttggaaataattgtcaggatgtataaaatagagaaaaagaaaaaaggtatcctacccagaggcaaccagataaacttttttgcctgtgcaaaaaaaaaaaaaaaaaa

SEQ ID NO: 96 - DNA, 4381 bp, Homo sapiens
ggcttagccgccaccgcgcgcttcggaaggccagagggagggggaggcctgtcagtctcgcgcgttgcctgggcgaagggggcggagctttggcgtggggcggccaatagtgggggtggctgcgtgggtcgccatggggacggggctgttcccggggaggctgtgatgggttgacaggtgcgtgacagtgggagctgctctcggcacaagcatgtacggcaaaggcaagagtaacagcagcgccgtcccgtccgacagccaggcccgggagaagttagcactctacgtatatgaatatctgctccatgtaggagctcagaaatcagctcaaacatttttatcagagataagatgggaaaaaaacatcacattgggggaaccaccaggattcttacattcttggtggtgtgtattttgggatctctactgtgcagctccagagagacgtgaaacatgtgaacactcaagtgaagcaaaagccttccatgattacagtgctgcagcagctcccagtccagtgctaggaaacattcccccaggagatggcatgccagtaggtcctgtaccaccagggttctttcaggcacttggaggtgtcccaggaagtcagccattactccccagtggaatggatccaactcgacaacaaggacatccaaatatgggtgggccaatgcagagaatgactcctccaagaggaatggtgcccttaggaccacagaactatggaggtgcaatgagacccccactgaatgctttaggtggccctggaatgcctggaatgaacatgggtccaggtggtggtagaccttggccaaacccaacaaatgccaattcaataccatactcctcagcatctcctgggaattatgtaggtcctccaggaggtggagggccaccaggaacacccatcatgcctagtccagcagattcaaccaactctggtgataacatgtatactttaatgaatgcagtacctcctggacctaacagacctaattttccaatgggtcctgggtcagatggtcccatgggtggattaggaggaatggagtcacatcacatgaatggctctttaggctcaggagatatggacagtatttccaagaattctcccaataatatgagcctgagtaatcaaccgggcactccaagggatgatggcgaaatggggggaaatttcttaaatccttttcagagtgagagttactcccctagcatgacaatgagcgtgtgatccattaccaagtctcctcatgaaaaccacagtgagtcagcccttcacagaactactacggaagaaaattattcatcacagtgtacagttaaacaaaggaatctcagtcacaccaaaccaacctttttatttcctgctctctcccctcttttgtgaagaaagcgggtccaaatgtgattcaaacaactgtacggagtggcatattagaattgccctaaactgaactgcaaataattatgtgtgtatgtatatgtgtgggaaagagaatgtactgtatatgtgtatgttatacagacatatacacatacatacattgacccacaggacattgtaaaatattatcacatgacatcttaagtagaaataagtagggacttttattccatcctttttttcacgtttacattttaattattacaagttgctcctgccccctccctgaactattttgtgctgtgtatatcactgctttatataagttattttttaaggtgaactcagatgttatggttttgtaaatgtctgcaatcatggataggaataaaatcgcttatttgagagctttcattaaattgcgtctgatgcaagttatcctgtgaatcacaaagtgtactgtctcaaaaaatagaagaaaatgtgtcttcgtctttatgttgaatcaaacaatttctcagttaccttcagtgaaaagtatttttttaatttttatttgagaaaaacacttcaaatcagtaaaagcttaactggggcctcacacagtatatttctgcaataactgctttaaacggagttcttgatttgtttgtcttagatgatacagaaatcattaaatagcccaaatcatttagaccatagcaataaagtgaccggggttgtcatatatttagcaacatcttttctctttaacatgatgaagcccaaaagtgataacaaaagcatttgcttgaatttgtcacttctcaccaggagtactagaggtaaatttttaataacatactaatgtgaaatggtatctggtttttattcagactttttgtgagcatattcttatagacactagaaataaatacatagaaggagactttgagcacaagggagaagagagttattagcactcctgaggcctctggaatgctgcttttctatccaggtatcttgcttgctaccagcagaattgactggtattggttctcactggccagggagcctctgctctgttcctggaatataaggcttttattcaggagcaaatcattgatagtaactttgctttatctagccattgacttcagcaggctaaaactacattgtgtaactgactgttcaaaaaagaataagtaaattttttttaatctaattcccttatggaaagcaccttgctctatggcactttccagatcttttgggattttgtgcttaattatacatacatacaccaaaatcacaatagaaagatatgaagactttaattttagactctgaaagataactgggtgatcctttgtgttaaaattgtgatacaaacaaccattgataaataccaactatgaatccaaactctagagactttgaaaagcattgtttaattgcaggtaagaggaatcttctctttcctttaggcttatagtctctaaagtgaaaatttggcaggatatagtcatgcagctcataatgacattccaatcaaccacagactgcatatacagcagtggtcctataagattataataccatatttttagcatatcttttctatgcttagatacacaaataccattgtattacagttgcctttggtattcagtacagtaacatgctgtacaggtttgtagcctaggagcaatagtttatattatatagcctaggtgtgtaggagcctataccatctaggtttgtgtaagtacactctatgatgttcagacaaggacaatattgcctgacaatgcatttctcagaatgtatacttatcattaagtaacatatgactgtatgtactagttcctgatgacttacttctctcaaattcataatgatttagtccttgtaaaaataaagattttgcctgtgcctaaacagggatactaggcagaactgttgagaaaaaaaagctgaattaaatttatgttgcagatttaaactatcataaaatgagcctcagttaatcacacacagtattcaggtgcctaggagtgcacaccggagaacagcctcatgctgtcaagctgcagaaacctttcatgcaaattcagatgaaaaggtctttacctcaagccagggtaacctgaatgaaggtgatagtttgtccagacacctgactttaccaagaagaattttgactttcatattttatgacaatcatataaaaattgacagtcctttgattattaagcttaatcttataatgctagaattttcaaatattttgttgactcttctccattgttaccgatcttgaaattcttttcttcgccttctgagaaggtattatttcttatcacaaagaatgatgaatatgattttatctacccttattttgggggtaatacgagaatatgaattgcatcatgatccccattatttctaacctaaaagtaaaattcgttttttttttcaaggcagagcagtcaattgattataagtatttatttcttttttcttcttggagcccagattaaaaagagttattttagatttaaaaatttcctgaaatagttgaaaaattatttttgaggagaaaattgtatccaagaaacccagaatgtaaggatacttgatttttatatccagataattctttcatgcactgaatggaagacagtatatctgtatattaatttttgtttagattttgaatcatttaacccttatccttttttcttgtaataagactatttaatgtttttctcttgtgttttccatctttatcaatgcattcgtgttggtcttgatgtatactacctgttcctagtgttatttttacacgtcatctcacagtaataatatcagcaattcttgctgcattgaacatattaaatacacatgtaaaatgaaaaagtaagcagtaggtaaaatcttgttactctgctttgcattctgcctaactcactgcatttgaaaatacatgtcaaattctttctgagggta

SEQ ID NO: 97 - DNA, 1831 bp, Homo sapiens
agccacgtgacccccgtgccggccaacgggtgcgccgggatttgggggataaagcgcggccccgcgcacagttgcggcgggagagcggcggggccgagagcgtgactcgcccgctccgcgctgcttcccccgcgccgcctccccgcgccgctcgcgcagccatgtccgaggagaagcccaaggagggtgtgaagacagagaatgaccacatcaacctgaaggtggccgggcaggacggctccgtggtgcagttcaagatcaagaggcacacgccgctgagcaagctgatgaaggcctactgcgagaggcagggcttgtcaatgaggcagatcagattcaggttcgacgggcagccaatcaatgaaactgacactccagcacagctggagatggaggacgaggacaccatcgacgtgttccagcagcagacgggaggtgtgccggagagcagcctggcagggcacagtttctagagggcccgtccccagcccgggccgtccatcctcgcattgctgttgaatggtgagcacgtgaccatgccgaccacaaaggtgtctgcggaaactcgaggacattcaccacgatgattttcctctctttgatgtacttcaagtgcaactcaaaactatatctgcagggatgaatctgtaacttaaattgggccaatcagaattgttatctttgttcaggtaaaatgagttgcaagatattgtgggtacttttgtgtgctcatttgtgttttccccccctcctacaacatttttttaaccccaaaattatagcctgaatgttcgcttttagtctggccagggatctgactcctgagttggttgcctctcccctgctcactccagtcacatagagaattggtgtttcccgcagtggggatgcagctgttggacaggtattgggggcaaggttggtagggaggacagactgtcacttgctgttacaggcacaggtgattaaaatgctaaatattgcaaatttaagctttgtcagtatatggaaaagttgaagggaaaatactggaatgcttcttcaaaggttaaaaaataaccgagtcttttggtaatttgaccccacgtgctctctggccctcaagcatgtaacctcggggtctgaggcccaggacccacccccctgccacccctcccaccccactccctgctcagtacctggcgttggtacacaggcaaggattggcacaaccaaaattggcctttttctccctcttaatattgaagaaattcccacatttctcatttggtaatggtgttgtggcctcagatttcttctagtatttgcttctgatgaatgattatggtctatacataaaaaagtaagactaagtattgctgaatttgcagttatgttgtcgtgtataagagctacttccaagtgtggttacaaatgaacccatggaatgatgacttcatgttcttctcgtgggtttgtgccgtgctgctttccaaataggtattgaatttatgcattagtctggtgatttcagttctgtgaaatattttgggatctataccaattaaacattttcatagttctgcctattgtccttccctgaggctccattgctgcttggtggccattctctgcctttttacagtcacctgaacaatgacccatcatctcttgcttgcttgaaatcttgctgaaatgttctcatttcctgtttgctgtatgggctcgggtgggatgtttgttggctctgttgtgtttattcaccaatttgtacattatttgttgtcctttactactgtaaacagtaaatatagtttggtattctgtcaaaaaaaaaaaaaaaaaaaaaaaa

SEQ ID NO: 98 - DNA, 3172 bp, Homo sapiens
gggcgcgagctcagggcgcctccggggtcctcactgcgctccccacgcgctgtgaccccatttgttgcacgtgcatgttcaggtcgagagagggatgcgacgtgttcggggagcagcccaccttgtgggtggccaatccgggacgggaatcttaaacttttaactcttggtgcaaagactgatccactggcggctttacgggagcgggaaaaaaatggcgctcccgacgctgccgtcctactggtgcagccagcagcgcctgaatcagcagctagcacgacagcgagagcaggaggcccggcttcggcagcagtgggagcagaacagccgttacttcaggatgtctgacatctgcagctccaaacaggcagaatggagctctaaaacctcctaccagcggagcatgcatgcctatcagcgggagaagatgaaggaggagaagaggaggagtctggaggcccgacgggaaaagctcaggcagctcatgcaggaggagcaggacctgctggccagagaactggaggagctgaggctgagcatgaacttgcaggaaagaagaatccgggagcagcacgggaagctgaaatcagccaaagaagagcagaggaaactgattgctgaacaacttttgtacgaacactggaaaaagaacaacccgaaacttcgagagatggagctggaccttcaccagaagcatgtcgtaaactcttgggaaatgcagaaagaagaaaaaaaacagcaagaagccaccgcagagcaagagaacaaacggtatgaaaatgaatatgaaagggcccgaagggaggcgctagaaaggatgaaagctgaagaggagaggaggcagctggaggacaagctccaggccgaggcactgctgcaacagatggaggagctgaagctgaaggaggtggaggcgaccaaactaaagaaggagcaggagaatctgttgaagcagcggtgggagctagagaggctggaggaagagcgaaagcagatggaagccttccggcagaaggcagagctggggcgtttcttgagacatcagtataacgctcaactcagcagacgcacacagcagatccaagaggagctggaggcagacaggcggatcctgcaggccctcctcgagaaggaggacgagagccagcgcctccacctggccaggcgggagcaggtcatggccgatgtggcctggatgaagcaggccattgaggagcagctgcagctggagcgggcgcgggaggcagagctgcagatgctgctgagggaggaggccaaggagatgtgggaaaagagagaggcagagtgggcccgagagcgcagcgcacgggacagactgatgagcgaggttctgacagggagacaacagcaaatacaagagaagattgagcagaaccgacgggcacaagaggaatccctgaaacacagggagcaacttattcgaaatcttgaggaggtgagagagttggctcgtcgcgagaaagaggagagtgaaaagctgaaatcggccaggaagcaggagctggaagcccaggttgcagagcgccggctgcaggcatgggaagcagaccagcaggaggaggaggaagaggaggaggcccggcgggtcgagcagctctcagatgccctgctgcagcaggaggcggagactatggctgagcagggctaccggcctaagccttacggacatccaaaaattgcttggaactgacttcatgggtaccataagtacagagaacaagggatgctgaggcttctgatcccagccgccaggcagttttacagggctctgttaacagtaagtgcccggggcactgtcagatggctcagcagtgcctgctcaggttcatcattgaaacatcccagtgtttggccagacattaaggtgtcgtgagagtccctttcatgcctttcttacccaagcaagggtctttgatgggcacgtgtttacagcgctgctgcatagtcttgtaatatattaacagtcacatcaactgaaggtcaatactaagagccacaggttgtacctgtgatggggcgtgtggtttcctgttgtctcacctttaattgtcaacctccagtgttgactctagaaatatgaggaaagcttttcagtttttaaaattgccatttaaatttagtctattaaaaacaaacctagaggtcttggtgcagttgatttcagagtttattaatttagtggtcccaaaagtattacatcttttatattctggaagaaaagaactgtgaacaaattagaaccccggaacactctgacgtccatggacgcattccagaaaagtggcaagagatgagtctttcctcctccaggaagcattttggtagaatttccatagagcattgtctgtgagtgactgatcccaacatgtatgttactaagccccaaaacgaacttcaaactgggtgtggtggcacgtgcctttagtcccagctacccgggaggctgcggcaagaggattgcttgagcccaggagttcgagtccaacctgggcaaaagagtgagaccccatctctaaaaccaaaaaggtaccttagaaggtcacctggttggctaaccttttaaaggcaggggcgtgacacgtaggacacattgggaatgtcttggctactacatgtagccttctgggatatatgtgcccagagggagaagcactgagcctgaagaaactagatgagtctcagaaccacagaccggccagaaatctctcccaccattatatcagcgtgatacaggtctacattcatttctacaaacaggaacaagttccttgcagcaataatattattttatgacttgtatttttactatacccttcctctgaggtttagttttcatcacattatgttcaagattccatatctccgtaaattacagctaattacagggcattgttccatggttattaaaaatcagagtttattaaaaatcctgagtcttaagggctgtcttacctttcacttccactgtcctgtagaaacagatcaagctgcaaaccacgtccttcatctgttgttcattttcttgcaactctttgactctgatcccctgagcagcacgttcatcacgcatgctctctgttgcgttccccatttcagatgtccagtaatggtgaaataaaatcctgcttcgacagcaaaaaaaaaaaaaaaa

SEQ ID NO: 99 - DNA, 3407 bp, Homo sapiens
actgcgcaggcgcaggagccgcgctctgggcctctgctcaggctctgccgcggacgacctcgaggcccttagttgactgggaccggaagtggcgtgtgctcggcctttctgtgttcctggcccgcggccgtcgggtgtgagctgcgccgaccgctctgagggttcgtggcccaccgctccttcgcggtccctgccgccaccgtccacgctcagcgttgtagagaagatggtgggtcggaacagcgccatcgccgccggtgtatgcggggcccttttcattgggtactgcatctacttcgaccgcaaaagacgaagtgaccccaacttcaagaacaggcttcgagaacgaagaaagaaacagaagcttgccaaggagagagctgggctttccaagttacctgaccttaaagatgctgaagctgttcagaagttcttccttgaagaaatacagcttggtgaagagttactagctcaaggtgaatatgagaagggcgtagaccatctgacaaatgcaattgctgtgtgtggacagccacagcagttactgcaggtcttacagcaaactcttccaccaccagtgttccagatgcttctgactaagctcccaacaattagtcagagaattgtaagtgctcagagcttggctgaagatgatgtggaatgagaaacaaatgtcaacataataaaatctcagttaaaaatattttaaaaattcttggtagttgagcagctctgggggaataagggcaaatatgcttgttatgaactacactgaaatctaccaaagttaatgtttactttgtgtagatccatttgtctattttatttatttttcccagtgaaaagtgtattttgatagagaacttttcattctataaatacactatgagttactaaaatatcatggattttgtttattcctgaaacatagttacatagttaaactgtacatatgacatggcttatgttaaaaatacccagtgctcagttttgaaagataggcaaaaaaaaaaaagtataggagaaactgaagaatgtacacttttttagagggcacattttgctgtaaatctggaaatttgatagacttgactgtgtttgtgaaaactgagcattaaaggttttgattgatcctttctttccatttaatctctgagacgtaaatatgtgaggtgtgctgctgtgctgggttaacagcttccttccctttctgtgtagcagtcttgaaatgttctgtttaaatcagtaggcttaatgtgttctgggtatttatctccttgtattttaaatatatgtagttgcaaatagcaccaggaattagatttctgtacacccctaatctagccttgtgagcttcgctagttaatgtgtgctcactttccctccatttgttacgtgagagaatgcgtctgctgatcactgaagtgtcccttttagcttctgattcattgggttctgttgggcatctttaaatccaccttaacctgaggaatgtatgtgggcaaccaggccctgcatttttttatattctgaattttgcatgcttgcctgacttagtatttctgaattgatgttttttttaatggtataactatcttgattttcactgaaattatatggttctgtcactactctgtaaattaatccgaaacttttaaggtaactgggatgatctgcttgtaaaaatgcttgttgccttttgctttatcttcagtgtacctccttaatcctgcttcaacttgattatcttgtgaaacgatgagagtaagttgcaaccttgtgactgaaaacttgaaaagagtggagcaggtgggacctcttattctcaaatagtgacatattctccgtagtcacagtttcagaactgagtaaggatccttggtacttggtggcatctgttgaactgaggagcatttctcattgtaaagattgcctttgttctgtctaaaagtctggagaaatcccaaagacttttcctatgtactaggcattttattttgattgacttacaaactcttcttaatcattatcaatctcggtttttttgtggtgcagtggaaggagaaataggtctagtttctgcctctgattagccgcacagccttgaacaaatcacatttcatctttgaacttacctctactgttagactaggcgactcacatttgaggacttttctcgggtatcttgagggtttgtgatcctgaacccttaaacagtgcttttttgttacacaggagggcttttttggggggatgaccagtacagacatgccagttagttttactagtgggatcccaaatccaaagcagtgtagtggtgattggtcagtgactaaccaggcagctaagaagtcttaggcagcagcccagacatgtatagaggggcagttagagggagaacaggggtgggaaagggagcaaggggcagatagctcagcaaggaaagaatgggctcagaaaaaggagggctggctggaggagtgaggggcagcttaagtttggggagggtagaaacgccgtttccttgggaactggagtgcagtatgagctgggtgtcacttggctctgaacatactggctttgctgtaatgcttgaaaaggcgttggtatcttcattttacagttcattaacccaagtacgttttcttatttaaatgacaactttggtgctttaaaatgaggtaccactttttaaagctagctgtgtcgagttaaagaaaaaatcagcagttttttctcccagaaatgtaattgccaaacactattcatccccatcttaagttttacaaggtgatgtaatcagcttgttgtagtgatgctggccaaatggtgctcagcaggtgagaacaaaaaaaccccagatctcagtgaactaatacacagcttgagcgtttccatgtgctaatgttgcacacttactaaaaaactttggaaatggaaaataatgtattagtgcaacagttgatgtgcttctttgggcaaagatatagttttgttccacaatttgtacttaaaagcgaaagaacattgaaaacatagacttactggctgtagcaatgctggcctgttaactgataactagaacttaggttcacgtttatgtaaagtgtgtaaaacctagtagagcttgcatagtcggcactcagtaaatgtttggttccttttgccccttggtaagtttattttaccatcctcccacctgccattctgactttattaaatcaacatgtggaccagagtgttaatgagatgttattgcagaagagattgagaaaattggtatatcatgcagataacatacaaaatctttttgtaacgtaaaaaatgcagttttattattgcttgtgcctcaactgtttaagtgaatattaaagggcttggagaaaaaaaaaaaaaaaaaaaaaaaa

SEQ ID NO: 100 - DNA, 877 bp, Homo sapiens
gcacttccgccctctcttaacatggagccggcggaaggggtggtgtagggccgggcgataatggcggcgtcgaggctggagctaaacctggtgcggctgctatcccgctgcgaggcgatggcagcggagaaacgggacccggacgagtggcgcctggagaagtacgtgggagccctagaggacatgttgcaggccctgaaggtccacgcgagcaaaccggcctctgaggtgatcaatgaatattcctggaaggtggattttctgaaggggatgctgcaagccgagaagctgacctcctcctcagagaaagcactggccaaccagttcctggcccctggccgtgtgccaaccacagccagagagcgagtgcccgccacaaagacggtgcatctgcagtcacgggcgcggtacaccagcgagatgcggagtgagctactaggcacggactctgcagagcctgagatggacgtaaggaagagaactggagtggcagggtcccagccagtgagtgagaagcagtcggcagctgagctagacctcgtcctgcagcgacatcagaacctccaggaaaagctggcggaagagatgctaggactggcccggagcctcaagaccaataccctggccgcccagagtgtcatcaagaaggacaaccagaccctgtcacactcactgaaaatggcggaccagaacctggagaaactgaagacggagtcagagcgtctggagcagcacacgcagaagtcagtcaactggctgctctgggccatgctcattatcgtctgcttcatcttcattagcatgatcctcttcattcgaatcatgcctaaactcaaataaagacccccgcccacctaaaaaaaaaaaaaaaaaaaaa

SEQ ID NO: 101 - DNA, 1818 bp, Homo sapiens
ggaggcgctgcgaccaattcaaacatggcgccgtcagcctcacattccccgttttccgctcatggcggcgtaggggcggaggtcgcgcctgagtgcgtccgcacgagagggcggaaccgtctccatggcaacccgcgcgcagccggggccactcagccaggcgggaagcgctggtgttgcggcgctggcgacagtcggggttgcgagcggcccggggccggggcggccagggccgctgcaggacgagaccctgggtgtggcgtccgtgccctcgcagtggagggccgtccagggcatccgctgggagacgaaaagttgccagacggccagcattgccactgccagtgcatccgcccaggccaggaatcatgtggacgcccaggtgcagacggaggcccccgtgcctgtcagcgtgcagcccccgtcccagtatgacatacccaggctcgcagcctttcttcggagagtggaggccatggtcatccgagagctgaacaagaattggcagagccacgcgtttgatggcttcgaggtgaactggaccgagcagcagcagatggtgtcttgtctgtataccctgggctacccgccagcccaagcgcagggtctgcatgtgaccagcatctcctggaactccactggctctgtggtggcctgtgcctacggccggctggaccatggggactggagcacgcttaagtccttcgtgtgtgcctggaacctggaccggcgagacctgcgtccccagcagccgtcggccgtggtggaggtccccagcgctgtcctgtgtctggccttccaccccacgcagccctcccacgtcgcaggagggctgtacagtggtgaggtgttggtgtgggacctgagccgtcttgaggacccgctgctgtggcgcacaggcctgacggatgacacccacacagaccctgtgtcccaggtggtgtggctgcccgagcctgggcacagccaccgcttccaggtgctgagtgtggccaccgacgggaaggtgctactctggcagggcatcggggtaggccagctgcagctcacagagggcttcgccctggtcatgcagcagctgccacggagcaccaagctcaagaagcatccccgcggggagaccgaggtgggcgccacggcagtggccttctccagctttgaccctaggctgttcattctgggcacggaaggcggcttcccgctcaagtgttccctggcagctggagaggcagccctcacgcggatgcccagctccgtgcccctgcgggccccagcacagtttaccttctccccccacggcggtcccatctactctgtgagctgttcccccttccacaggaatctcttcctgagcgctgggactgacgggcatgtccacctgtactccatgctgcaggcccctcccttgacttcgctgcagctctccctcaagtatctgtttgctgtgcgctggtccccagtgcggcccttggtttttgcagctgcctctgggaaaggtgacgtgcagctgtttgatctccagaaaagctcccagaaacccacagttttgatcaagcaaacccaggatgaaagccctgtctactgtctggagttcaacagccagcagactcagctcttggctgcgggcgatgcccagggcacagtgaaggtgtggcagctgagcacagagttcacggaacaagggccccgggaagctgaggacctggactgcctggcagcagaggtggcggcctgaggggtcccgggaggcgggtgcaagccttcgctgtgccgagccttgtgtttctgacgcaagccaaatgaagaaaagcaaagctt

SEQ ID NO: 102 - DNA, 3893 bp, Homo sapiens
ccctccgaaatctcgcgagggtaggtgcgcgtcggtattttgcgggcaactagctcttccagctgctgtaaattgctgctgcgggagaaactggagccgctgtagccggcgcgcccttcttcccttactgcgaggagccaccgcctctttcgcgctccttatacacctatcactgggagcggtggcagcaacattccctggaccaaccgccgcctcttcaggcggccgctttgccggtcattcccgaagcccggcaactgagggcggccccctttccttaacagtctcctcgctacagatcgtctgctccctcagcctcgcccgagacccacttccccagtctcgcccgggtggaggtcgacgaggaggagacaagagtcacccttcctccaggcggcgccggccccctcacccgcgggtgtgtcctataaatggcgtcggaaagcgacaccgaggaattctatgatgcccctgaagatgtgcacctagggggcggctaccccgtggggtctccaggaaaagttgggctttcaacattcaagattattgaaagtattattgaggagagtcagaaagtactacagcttgaagatgactctttggattccaaaggaaaagaactctctgatcaagctactgccagtcctattgtggctagaacagatctgagcaatatacccggactgttagccatagatcaagtactaccggaagaatcccaaaaggcagagagtcagaatacatttgaagagactgaattagaattaaaaaaatgctttccttctgatgaaacctgtgagaaaccagtagatgaaaccacgaagttaactcaaacaagttcaactgagcagcttaatgtgcttgaaactgaaacagaagtattgaacaaggaagcagtggaagtcaaaggaggtggtgatgttttagagcctgtgtcctcagactccttatctactaaagattttgccgctgtggaagaagtggcccctgccaaacccccaagacaccttactccagagcctgatatagtggctagtacaaagaagcctgttccagcacgcccacctcctccaactaatttcccacctcctagacccccacctccttctcgacctgctccaccaccaagaaaaaggaaaagcgaattggaatttgagactctgaaaactcctgatatagatgttcccaaagagaatattacgtctgattctctcctaaccgcaagcatggcttcagaaagtacggttaaggattctcagccttctcttgatttggcaagtgctaccagtggagataaaatagttaccgcccaggaaaatggaaaagcacctgatgggcagactgtagcaggtgaagtgatgggccctcagagacctagatccaactctgggagagagcttactgatgaggaaattttagccagtgtaatgattaagaacctggatactggagaagaaatacctttgagtcttgcagaagagaaactaccaacaggcattaatcctctcactctacacatcatgagaaggacaaaagaatatgtaagtaatgacgcggcacagtcagatgatgaagagaagttacagtctcagccaacagatactgatggtggaaggttaaaacagaaaacgactcaactaaagaagtttcttggaaaatcagtaaagagagcaaagcaccttgctgaggaatatggtgaacgtgctataaataaagttaaaagtgttagagatgaagtgtttcatactgatcaagatgatccttcatcaagtgatgatgaaggaatgccatacacaagaccagttaaattcaaagcagcacacggtttcaaaggaccttatgattttgatcagatcaaagtggtgcaagatcttagtggtgaacatatgggagctgtttggaccatgaaattttctcactgtggccgattacttgcctcagctggacaagacaatgtagtgagaatatgggctttaaaaaatgcttttgactatttcaacaatatgcgaatgaaatacaatactgaaggacgtgtgtccccatcaccctctcaggaaagtctaagttcatcaaaatcggatacagatacaggggtatgcagtggaactgatgaagaccctgatgataaaaacgcaccctttcggcaacggccattttgcaaatataaaggacatactgctgatctccttgatctttcatggtctaaaaactactttcttctttcttcttcaatggataaaacagtcagattatggcacatttctcgaagagaatgcctttgctgttttcaacatatagattttgtcactgccatagcttttcatccaagacatttgaaataccatacacaaatacatgtccgatctactagagggcgcaacaaggttggaagaaaaattactggcattgagcctttacctggagaaaataagatattggtaacctcaaatgactccagaatcagactatatgatttgagagatttgtcactatccatgaagtataagggttacgtcaatagcagcagccagatcaaagcaagtttcagccatgattttacttacctcgttagtggttcagaagataagtatgtttatatctggagtacctaccatgacctaagcaagtttacttcagtcaggagagatcgtaatgacttctgggaaggtattaaagcccacaatgcagttgttacatcagccatctttgcaccaaacccaagtttgatgttatctttggatgtgcaatctgaaaaatcagaagggaacgagaaaagtgaagatgctgaagttttggatgccacaccttctggtattatgaagacagataacacagaagttcttctctctgctgacttcactggagcaatcaaagtgtttgttaataaaagaaaaaatgtatcttaatttgaaatggcatttaaaataaacatatcagtaagtttctatatgtatcaaaactgaaaaaatagtgttccaggctaacatacttttttaatttttattgaaagttgttcaaatataatatattttttgagaggcagtgttaatgatctaggaaaccctgggctgatagagtagaaaggaatatggctagaataacattgccaaacattaggctttatgttttgttatgtttgtgttttcgttgtataattatgaacatgcacaagtttctgcatgaaaagatattaatatattaatcacatgtatgtgccttttggttacatgcattaaatctaacagagttaaattatttcagtggctcttttggcctcttactaggggggatagtcttgtttctagcttaaacaattttttttttgcacaaaatttcatttttaataaaagtggtatcttttgactgagttattgttttgaaaatggtatataggtttccagtaggtcaacaaccatatgtaaatggtttttataaatttctcaatttggggacaagatttttttgtggtctaaattgtgggcttaagattcttttctttatatgtgtacatataatttttttttctttgccacactggagcacaatgtttctatgtaaagaattattttcattctttatccatgagcaccaggctttgctcacttaaaaaaaaattaagccacattaaggagtgagtcttcttttttacaataatgtaaaaattaaactgtttacatttttttaaagcattgtagtttttaaaaattaagctgttttgttttgtgttgttgaatttgaaagcctttgtaaatatcaatataatgtaccaatgaaataacatctggggcaatgaaaccctgatcatgttgttgatggttagcatatgtttctgaaaattaaatatgtattattaaaagttggtctccaacacttgtttaaaaaaaaaaaaaaaa

SEQ ID NO: 103 - DNA, 10100 bp, Homo sapiens
cacgtgacccaggtgcgtacgcgacggagcggggtgtgaagatggcggacgaagaggccgagcaggagaggttgagttgcggcgaaggcggctgcgtcgcggagctgcagcgcctgggcgagcggctccaggagctggagctacagctgcgggagagccgggtaccggccgtggaagcggccaccgactactgtcagcagctgtgccagacactcctagaatatgcagagaaatggaaaacttcagaagatcctttacctttattggaggtatacacagtggctatccaaagttatgttaaagcccgaccttatcttacctctgaatgtgaaaatgtagccttggttctggaacgcttggcattaagctgtgttgaacttttactgtgtctgcctgttgagttatcagataaacagtgggaacaatttcagacactggtgcaggtagctcatgaaaagctgatggagaatggcagctgtgaattgcattttttagctactctagctcaagagactggggtgtggaaaaacccggtactgtgcactattctttcccaggaaccattggataaggataaagtgaatgaatttttagcttttgagggtcccatcttgttggatatgagaattaaacatctaatcaaaacaaatcagttaagtcaagcaactgctctagcaaagctgtgttctgaccatccagagattggcataaaaggtagttttaagcaaacttaccttgtctgtctttgtacatcatcaccaaatggaaagttaatcgaagagatttcagaagttgattgcaaagatgcactggaaatgatctgtaacttagaatctgagggtgatgaaaaaagcgctcttgttttatgtactgcgtttttgtcacgtcagctccaacaaggagatatgtactgcgcttgggaacttactctcttttggagtaaattacaacaaagagtagaaccatctatacaagtgtaccttgagaggtgtcgtcaactttctttgttaacgaaaacagtatatcacattttcttcctgattaaagttattaattcagagactgaaggggctggacttgctacctgtatagaactgtgtgtaaaggctcttcgcttggagtctacagaaaatactgaagtgaaaatatctatttgcaagaccatttcatgtttgttgcctgatgatctggaagttaaacgtgcttgtcaactgagtgaatttcttattgagcctacagtagatgcgtattatgctgtggaaatgttgtataatcagccagaccagaaatatgatgaagagaatcttccaataccaaattctttacgctgtgagctgttacttgtattgaaaactcaatggccctttgatccagaattctgggattggaaaaccttgaaacgacaatgtcttgcattaatgggagaagaagcatccattgtgtcttcaatagatgaactaaatgacagtgaagtatatgaaaaagtggtagactaccaagaagagagtaaagaaacttctatgaatgggctttctggtggagttggtgctaattctggccttcttaaagacattggtgatgaaaagcagaagaagagagagataaaacagttaagagagaggggatttatatctgctcggtttaggaattggcaagcctacatgcagtattgtgtgttgtgtgacaaagaattccttggtcacagaatagtacgacatgctcagaaacattacaaagatggaatttatagttgccccatatgtgcaaagaactttaattctaaagaaacttttgtccctcatgtcacactgcatgttaaacaatctagtaaagagagactagcagctatgaaaccattaagaagattgggaaggcctccaaagatcacaactaccaatgaaaatcagaagactaatactgtggctaaacaggagcagcgacctataaaaaagaatagtctctattcaacagattttatagtgtttaatgacaatgatggttcagatgatgagaatgatgacaaagataaatcctatgagccagaagtgattccagtccagaaaccagtacctgttaatgaatttaattgccctgtaactttttgtaaaaagggctttaagtactttaaaaatttaattgctcatgtgaaggggcataaagataatgaagacgccaagcgctttcttgaaatgcagagcaaaaaagttatttgccagtactgtaggcggcattttgtgagtgttactcatctcaatgatcacttacagatgcactgtggcagtaaaccatatatctgtatacagatgaaatgtaaagctggttttaatagttacgccgagcttttaacccaccgaaaggagcatcaagtctttagagcaaaatgtatgtttcctaaatgtggaagaattttttcggaagcttatttactatatgatcatgaagcacaacattataatacgtacacttgtaagttcacaggttgtggtaaagtttatcgttctcagggtgagctggaaaagcatctggatgatcacagtactcctcctgaaaaagtgctgcctcctgaagcccaacttaattcatctggagattccattcagccttctgaagtgaatcagaacacagcagagaatattgagaaagaaagatctatgcttccttcagaaaataacattgaaaacagcttactagcagatagaagtgatgcttgggataaaagcaaagcagaatcagctgtgaccaaacaagaccagatttctgcctctgagctcaggcaagctaatggaccattgtcaaatggtttggaaaaccctgctactactcctctacttcaatccagtgaagtagctgtgtccattaaggtgtctctcaatcaggggattgaggataactttggaaagcaagaaaactcaactgtggaaggcagtggtgaagcactggtcacagacttacatacgccagttgaagatacttgtaatgatttgtgtcatccaggtttccaggagagaaaagaacaagattgctttaatgatgcccatgttactcagaattctttagtaaattcagaaactctcaaaataggtgaccttaccccacaaaacttagaaagacaagtgaacaacttgatgaccttttctgtgcaaaatcaggcagcatttcaaaacaatttaccaacttccaaatttgaatgtggagataatgttaaaacatcatccaatctttataatttacctcttaagacattagaaagtattgcatttgttccaccgcagtccgacctaagtaattcattaggaactccatcagtgcctccaaaagctccagttcagaaattcagctgccaggtcgagggatgtactcgaacctataattcttcacagagtattgggaaacacatgaagacagcacaccctgaccaatatgctgcatttaaaatgcagcgcaaaagtaaaaaaggtcagaaagctaacaacttaaatacaccaaataatggaaagtttgtttattttttgccatcaccggtgaacagctcaaatccattttttacatcacagaccaaagccaatgggaatcctgcttgttcggcccagttgcagcatgtctcgccacccatttttccagctcatttagcaagtgtgtcaactccattgttgtcctcaatggaaagtgtcataaatccaaatataacttctcaggataaaaatgaacaaggtggtatgttatgttcccaaatggaaaatttacctagtactgccttgccagcacaaatggaagatctaaccaaaacagttctgcctttgaatattgacagtggctcagatcctttccttcctttacctgcagaaagtagttcaatgtctctcttcccttcaccagcagatagtgggactaattctgttttttcccaactggaaaataatacaaatcattattcctcacagattgaaggaaacactaattcctcctttctaaaggggggtaatggtgaaaatgcagtttttccttcacaagtgaatgttgcaaataacttcagtagcaccaatgcccaacagtctgcacctgaaaaagttaaaaaagaccgtgggcggggcccaaatgggaaggaaagaaaacctaagcacaacaaaagggctaaatggcctgcaattatcagagatgggaaatttatctgtagcaggtgttacagggcttttactaatcccagatcactgggtgggcacttatccaagcgatcttactgtaaaccactggatggagccgaaattgctcaagaacttctacagagtaatggacagccttctcttcttgccagcatgattctctccacaaatgcagtaaatttgcagcagccacaacaatctaccttcaatccagaagcatgttttaaagatccatcatttctacagcttcttgctgaaaatcgctcgccagcatttttaccaaatacatttcctcgatctggtgtgactaactttaataccagtgtcagtcaagaaggtagtgaaattattaaacaggctttggaaactgctggcattcccagtacatttgagggtgccgaaatgctttctcatgtttcaacaggttgtgtctctgatgcatcacaagtaaatgcaacggtgatgccaaatccaactgtaccacccctgttgcacactgtatgccatccaaacaccttgctgaccaaccagaataggacgtcaaactccaaaacttcctccattgaggaatgtagcagcttgcctgtttttccaacgaatgacttactactgaagactgttgaaaatggtttgtgctctagttcatttcctaattctggtgggccatcacaaaattttaccagtaacagttctcgtgtttctgttataagtggtcctcagaacacaagatccagtcatttaaataaaaagggaaacagtgcttctaagagaagaaagaaagttgctcctccactaattgcacctaacgcttcccaaaacttggtaacaagtgacttaacaacaatgggactcatagcaaagagtgttgaaatcccaactactaaccttcattcaaatgtaattccaacttgtgaacctcagagtttggtggaaaatctaacacagaaattaaataatgttaacaatcagttatttatgactgatgtaaaagagaatttcaaaaccagtcttgagtcccatacagtgttagcccctttaacattaaaaactgaaaatggtgattcccaaatgatggctttgaattcatgcacaacttcaataaattctgatttgcagatttctgaagacaatgttatacaaaactttgaaaagactcttgaaattattaaaactgctatgaattctcaaatacttgaggtaaaaagtggatctcagggtgctggtgaaacttcacaaaatgctcaaataaattataacattcagcttccttcagtaaacactgtgcaaaataacaaattacccgattcttctccgttttcctcctttataagtgtcatgccaacaaaaagtaacattcctcagtctgaagtatcacataaggaggatcaaatacaggaaattttagaaggcttacagaaattaaaattagaaaatgacctatccactccagcatcccaatgtgtactgataaatacatcagtgacactgactcccacgcctgttaaatcaactgcagatatcacagttattcagccagtttctgaaatgataaacattcaatttaatgacaaagttaataaaccctttgtgtgtcaaaaccaaggctgtaactacagtgctatgacaaaggatgcactatttaagcactatggtaaaattcatcaatacactccagaaatgattcttgaaattaagaagaatcaattgaaatttgctccctttaaatgtgtagtacctacatgtacaaaaacatttacaagaaattctaacctccgggcacactgtcagttggtgcatcattttacaactgaagaaatggtaaagttaaaaattaaaaggccttatggaagaaaatctcagagtgaaaatgtgccggcctcacgaagtacacaagtgaaaaaacagctagctatgacagaggaaaataaaaaggaatctcagcctgctttagaattgagagcagagacccaaaatacccacagtaatgtagcagtgatcccagaaaaacaacttgtagaaaaaaaaagtcctgacaaaacagaaagttctttacaagtgattacagttacttcagaacaatgtaatacaaatgcactcacaaacacacaaaccaaaggacggaagattaggaggcataaaaaagaaaaggaggagaaaaaacgaaagaagccagtttcccaatcccttgagtttccaacaagatacagtccttacagaccttatcgatgtgttcaccagggatgctttgctgcctttacgatacagcaaaacttgattctccattaccaggctgtacacaaatcagatctacctgcattttcagcagaggtcgaagaggaaagtgaagctggtaaagaaagtgaagaaactgaaactaaacaaactttgaaagaatttcgatgtcaggtaagtgactgttctcgaattttccaagcaattactggcctaatacaacactacatgaaacttcatgaaatgactcctgaagaaattgaaagtatgactgcttcagtggatgttgggaagtttccatgtgaccagttagagtgtaaatcttcatttactacatatttgaactatgttgttcatctagaggcagaccacgggattggactaagggcaagtaaaacagaagaagatggtgtatacaaatgtgattgtgaaggctgtgaccgtatatatgcaacccggtcgaatctcctccgacacatttttaataagcataatgacaaacataaggctcatttgattcgtccaagaagattaacaccaggccaggaaaatatgtcaagcaaggcaaaccaagaaaaatcaaagtctaaacatcgggggaccaagcacagcagatgtggaaaggaaggaataaaaatgcccaagaccaaacgaaagaaaaaaaataatttagaaaacaagaatgcaaagattgtgcagattgaagaaaataagccttattctctgaaacgtgggaagcatgtatattctataaaggctagaaatgatgccctgtctgagtgtacaagcagatttgtaacccagtatccatgtatgataaagggatgtacttcagttgttacaagtgaaagcaatataattagacattataagtgccataaattatctaaggcatttacatcacaacaccgaaatcttcttattgtattcaaacggtgttgcaactcacaagtaaaggaaacgtctgagcaagaaggtgctaagaatgatgtgaaagattctgacacgtgtgtatcagagagcaatgataattcaagaacaacagctacagtttcacaaaaggaagttgaaaaaaatgaaaaagatgaaatggatgaactaacagaattgtttattacaaaattaataaatgaagatagcacaagtgtagagacccaagctaatacttcttcaaatgtaagtaatgattttcaggaagataacctctgccagtcagaaagacaaaaagcaagtaatttgaagagagttaataaggaaaaaaatgtctcacaaaataaaaaaaggaaagttgaaaaagctgaaccagcatcagcagctgagttaagtagcgtgcgtaaagaagaagaaactgctgttgccattcaaaccattgaggagcatcctgcatcttttgactggagctcttttaagccaatgggatttgaagtatcatttctgaagtttcttgaggagtctgcagtgaagcagaagaaaaatactgacaaagaccatccgaatactggaaacaaaaaaggatcccattcaaattcaagaaaaaatattgataagactgctgtgactagtggaaatcatgtatgtccttgtaaagaaagcgaaacgtttgtacagtttgccaatccatcacagcttcagtgcagtgataatgtaaaaattgttttagacaagaatcttaaagattgcactgagcttgtcttaaagcaacttcaggaaatgaaacctaccgtcagtctgaaaaaacttgaagtacattcaaatgatccagatatgtctgttatgaaagatatcagtataggtaaagccacaggcagaggtcagtactgataattaatgtagtataaatacatcatttaccattttattttaaataggaagccatcaagcatgctagaattgtgaaactttcattatatttttttgttgttgacatgaattaacctggccaaaaacaaaaaagaaaaaaaaaacatgacatttgtcatgtaaaacttttttttatccctatgggacttgaggaacagaatcagtacttcagttattgtaaatagtgagctaaacctcaaatttctatcacccagttgcccttttcatgaactaaacaattatctgtgtgattggtatgtttcaccaggtcactgctcatgtataacagtactctttatttgtagataccttttttgtatatatttattattgtaaatcatgtgctgccaccagcagtctgtaagtctaaactattaaatgacacatttatatttggaattttaatttttaactaagcgatcaagttttttaaattgttcttttattgttttaaattaagaactttttgaactaaaaccagaaactctgccatagttcattgatttttacatgaaacatttatttacaagatgatatcaagattacttttcacaaaataggcacattatatcaacactttgctctgctttgtaaatttgccatccaggattttggggtggtattcatgtgaaattaaagcagattctctagcagtttcctatagctacagtttttttttttcattgcttctaattggatatagttactatgagtccatgaaatacaatggaaatgtgaataaagaatttactacattgaagattttaaacatttggtattaaaaaaaaatcctttgtgaatgtgatagaaaactagtagtgtggagcagtgtaaatatttgaggtggtgatttgtgaagtagcccagtattgccttaaataaaatcacatttcatttcttgttttatacatgtgatcttataaagattttttgttttgttttgttttccattttctgagatttatagattggtgtatagctttaaactgtataaagttttgtggaaagatttttttaaacatttttataaatcttaaaattgatatcatcaaagtgagcccatcttgtgtttataaaatacaagagtccttaacatttataattacatagataaaacactttctataaggaagttggatgttttgattttactgtttatagatgttagattgtacagatttgtctgtatttctcaccatatctaatgatacttttttcattagattggtcttcaagaacagtattagttataattattttggttattcagtatatagttagctcttacagtttagctttattcaccatatttatactgtggattcacagcgagaggtagaggttattccaggagagttgatgaccttcatttaaagtccaactaaaatcagtagtagaaacataagaaaacatctttgcaatatttacttttgtttctgtttgccgtaaatagtaacattgtttttttttattttgtgtttgttataaaacagttgcattcacaatattattggcctgagatattgatgatattgtgatggtatgaaaatgtgtacattccctgtgcaacatcagatttgcaggaaaaatgaagcacttactgaaatcgctggtactctgaataaataagcatggtcaaggagtgaactattttcttttggaaatttctttttaatttttattattaaagtattttatttttagggccttttgggttttattgaatagttcatttcacctgtttaagacttactaccaataagcataaaacctgacacgttaaaatccctgccctttggtgagcccactgttatttattaaaataaaagttattttatgggtgattaa

SEQ ID NO: 104 - DNA, 401 bp, Homo sapiens
ctctccgccagaccgccgccgcgccgccatcatggacaccagccgtgtgcagcctatcaagctggccagggtcaccaaggtcctgggcaggaccggttctcagggacagtgcacgcaggtgcgcgtggaattcatggacgacacgagccgatccatcatccgcaatgtaaaaggccccgtgcgcgagggcgacgtgctcacccttttggagtcagagcgagaagcccggaggttgcgctgagcttggctgctcgctgggtcttggatgtcgggttcgaccacttggccgatgggaatggtctgtcacagtctgctccttttttttgtccgccacacgtaactgagatgctcctttaaataaagcgtttgtgtttcaagttaaaaaaaaaaaaaaaaaaaaa

SEQ ID NO: 105 - protein, 434 aa, Homo sapiens
MEAGAGAGAGAAGWSCPGPGPTVTTLGSYEASEGCERKKGQRWGSLERRGMQAMEGEVLLPALYEEEEEEEEEEEEVEEEEEQVQKGGSVGSLSVNKHRGLSLTETELEELRAQVLQLVAELEETRELAGQHEDDSLELQGLLEDERLASAQQAEVFTKQIQQLQGELRSLREEISLLEHEKESELKEIEQELHLAQAEIQSLRQAAEDSATEHESDIASLQEDLCRMQNELEDMERIRGDYEMEIASLRAEMEMKSSEPSEELQELRERYHFLNEEYRALQESNSSLTGQLADLESERTQRATERWLQSQTLSMTSAESQTSEMDFLEPDPEMQLLRQQLRDAEEQMHGMKNKCQELCCELEELQHHRQVSEEEQRRLQRELKCAQNEVLRFQTSHSVTQSSPTPNPPIFSLPLVGLVVISALLWCWWAETSS

SEQ ID NO: 106 - protein, 76 aa, Homo sapiens
MAETDPKTVQDLTSVVQTLLQQMQDKFQTMSDQIIGRIDDMSSRIDDLEKNIADLMTQAGVEELESENKIPATQKS

SEQ ID NO: 107 - protein, 328 aa, Homo sapiens
MLPRVGCPALPLPPPPLLPLLPLLLLLLGASGGGGGARAEVLFRCPPCTPERLAACGPPPVAPPAAVAAVAGGARMPCAELVREPGCGCCSVCARLEGEACGVYTPRCGQGLRCYPHPGSELPLQALVMGEGTCEKRRDAEYGASPEQVADNGDDHSEGGLVENHVDSTMNMLGGGGSAGRKPLKSGMKELAVFREKVTEQHRQMGKGGKHHLGLEEPKKLRPPPARTPCQQELDQVLERISTMRLPDERGPLEHLYSLHIPNCDKHGLYNLKQCKMSLNGQRGECWCVNPNTGKLIQGAPTIRGDPECHLFYNEQQEARGVHTQRMQ

SEQ ID NO: 108 - protein, 161 aa, Homo sapiens
MAGRKLALKTIDWVAFAEIIPQNQKAIASSLKSWNETLTSRLAALPENPPAIDWAYYKANVAKAGLVDDFEKKFNALKVPVPEDKYTAQVDAEEKEDVKSCAEWVSLSKARIVEYEKEMEKMKNLIPFDQMTIEDLNEAFPETKLDKKKYPYWPHQPIENL

SEQ ID NO: 109 - protein, 767 aa, Homo sapiens
MSFDPNLLHNNGHNGYPNGTSAALRETGVIEKLLTSYGFIQCSERQARLFFHCSQYNGNLQDLKVGDDVEFEVSSDRRTGKPIAVKLVKIKQEILPEERMNGQEVFYLTYTPEDVEGNVQLETGDKINFVIDNNKHTGAVSARNIMLLKKKQARCQGVVCAMKEAFGFIERGDVVKEIFFHYSEFKGDLETLQPGDDVEFTIKDRNGKEVATDVRLLPQGTVIFEDISIEHFEGTVTKVIPKVPSKNQNDPLPGRIKVDFVIPKELPFGDKDTKSKVTLLEGDHVRFNISTDRRDKLERATNIEVLSNTFQFTNEAREMGVIAAMRDGFGFIKCVDRDVRMFFHFSEILDGNQLHIADEVEFTVVPDMLSAQRNHAIRIKKLPKGTVSFHSHSDHRFLGTVEKEATFSNPKTTSPNKGKEKEAEDGIIAYDDCGVKLTIAFQAKDVEGSTSPQIGDKVEFSISDKQRPGQQVATCVRLLGRNSNSKRLLGYVATLKDNFGFIETANHDKEIFFHYSEFSGDVDSLELGDMVEYSLSKGKGNKVSAEKVNKTHSVNGITEEADPTIYSGKVIRPLRSVDPTQTEYQGMIEIVEEGDMKGEVYPFGIVGMANKGDCLQKGESVKFQLCVLGQNAQTMAYNITPLRRATVECVKDQFGFINYEVGDSKKLFFHVKEVQDGIELQAGDEVEFSVILNQRTGKCSACNVWRVCEGPKAVAAPRPDRLVNRLKNITLDDASAPRLMVLRQPRGPDNSMGFGAERKIRQAGVID

SEQ ID NO: 110 - protein, 180 aa, Homo sapiens
MQAEGRGTGGSTGDADGPGGPGIPDGPGGNAGGPGEAGATGGRGPRGAGAARASGPGGGAPRGPHGGAASGLNGCCRCGARGPESRLLEFYLAMPFATPMEAELARRSLAQDAPPLPVPGVLLKEFTVSGNILTIRLTAADHRQLQLSISSCLQQLSLLMWITQCFLPVFLAQPPSGQRR

SEQ ID NO: 111 - protein, 705 aa, Homo sapiens
MQLGEQLLVSSVNLPGAHFYPLESARGGSGGSAGHLPSAAPSPQKLDLDKASKKFSGSLSCEAVSGEPAAASAGAPAAMLSDTDAGDAFASAAAVAKPGPPDGRKGSPCGEEELPSAAAAAAAAAAAAAATARYSMDSLSSERYYLQSPGPQGSELAAPCSLFPYQAAAGAPHGPVYPAPNGARYPYGSMLPPGGFPAAVCPPGRAQFGPGAGAGSGAGGSSGGGGGPGTYQYSQGAPLYGPYPGAAAAGSCGGLGGLGVPGSGFRAHVYLCNRPLWLKFHRHQTEMIITKQGRRMFPFLSFNINGLNPTAHYNVFVEVVLADPNHWRFQGGKWVTCGKADNNMQGNKMYVHPESPNTGSHWMRQEISFGKLKLTNNKGANNNNTQMIVLQSLHKYQPRLHIVEVTEDGVEDLNEPSKTQTFTFSETQFIAVTAYQNTDITQLKIDHNPFAKGFRDNYDSMYTASENDRLTPSPTDSPRSHQIVPGGRYGVQSFFPEPFVNTLPQARYYNGERTVPQTNGLLSPQQSEEVANPPQRWLVTPVQQPGTNKLDISSYESEYTSSTLLPYGIKSLPLQTSHALGYYPDPTFPAMAGWGGRGSYQRKMAAGLPWTSRTSPTVFSEDQLSKEKVKEEIGSSWIETPPSIKSLDSNDSGVYTSACKRRRLSPSNSSNENSPSIKCEDINAEEYSKDTSKGMGGYYAFYTTP

SEQ ID NO: 112 - protein, 261 aa, Homo sapiens
MAAAVPRAAFLSPLLPLLLGFLLLSAPHGGSGLHTKGALPLDTVTFYKVIPKSKFVLVKFDTQYPYGEKQDEFKRLAENSASSDDLLVAEVGISDYGDKLNMELSEKYKLDKESYPVFYLFRDGDFENPVPYTGAVKVGAIQRWLKGQGVYLGMPGCLPVYDALAGEFIRASGVEARQALLKQGQDNLSSVKETQKKWAEQYLKIMGKILDQGEDFPASEMTRIARLIEKNKMSDGKKEELQKSLNILTAFQKKGAEKEEL

SEQ ID NO: 113 - protein, 969 aa, Homo sapiens
MAKSNSVGQDSCQDSEGDMIFPAESSCALPQEGSAGPGSPGSAPPSRKRSWSSEEESNQATGTSRWDGVSKKAPRHHLSVPCTRPREARQEAEDSTSRLSAESGETDQDAGDVGPDPIPDSYYGLLGTLPCQEALSHICSLPSEVLRHVFAFLPVEDLYWNLSLVCHLWREIISDPLFIPWKKLYHRYLMNEEQAVSKVDGILSNCGIEKESDLCVLNLIRYTATTKCSPSVDPERVLWSLRDHPLLPEAEACVRQHLPDLYAAAGGVNIWALVAAVVLLSSSVNDIQRLLFCLRRPSSTVTMPDVTETLYCIAVLLYAMREKGINISNRIHYNIFYCLYLQENSCTQATKVKEEPSVWPGKKTIQLTHEQQLILNHKMEPLQVVKIMAFAGTGKTSTLVKYAEKWSQSRFLYVTFNKSIAKQAERVFPSNVICKTFHSMAYGHIGRKYQSKKKLNLFKLTPFMVNSVLAEGKGGFIRAKLVCKTLENFFASADEELTIDHVPIWCKNSQGQRVMVEQSEKLNGVLEASRLWDNMRKLGECTEEAHQMTHDGYLKLWQLSKPSLASFDAIFVDEAQDCTPAIMNIVLSQPCGKIFVGDPHQQIYTFRGAVNALFTVPHTHVFYLTQSFRFGVEIAYVGATILDVCKRVRKKTLVGGNHQSGIRGDAKGQVALLSRTNANVFDEAVRVTEGEFPSRIHLIGGIKSFGLDRIIDIWILLQPEEERRKQNLVIKDKFIRRWVHKEGFSGFKRYVTAAEDKELEAKIAVVEKYNIRIPELVQRIEKCHIEDLDFAEYILGTVHKAKGLEFDTVHVLDDFVKVPCARHNLPQLPHFRVESFSEDEWNLLYVAVTRAKKRLIMTKSLENILTLAGEYFLQAELTSNVLKTGVVRCCVGQCNNAIPVDTVLTMKKLPITYSNRKENKGGYLCHSCAEQRIGPLAFLTASPEQVRAMERTVENIVLPRHEALLFLVF

SEQ ID NO: 114 - protein, 449 aa, Homo sapiens
MWKSVVGHDVSVSVETQGDDWDTDPDFVNDISEKEQRWGAKTIEGSGRTEHINIHQLRNKVSEEHDVLRKKEMESGPKASHGYGGRFGVERDRMDKSAVGHEYVAEVEKHSSQTDAAKGFGGKYGVERDRADKSAVGFDYKGEVEKHTSQKDYAKGFGGQYGIQKDRVDKSAVGFNEMEAPTTAYKKTTPIEAASSGTRGLKAKFESMAEEKRKREEEEKAQQVARRQQERKAVTKRSPEAPQPVIAMEEPAVPAPLPKKISSEAWPPVGTPPSSESEPVRTSREHPVPLLPIRQTLPEDNEEPPALPPRTLEGLQVEEEPVYEAEPEPEPEPEPEPENDYEDVEEMDRHEQEDEPEGDYEEVLEPEDSSFSSALAGSSGCPAGAGAGAVALGISAVALYDYQGEGSDELSFDPDDVITDIEMVDEGWWRGRCHGHFGLFPANYVKLLE

SEQ ID NO: 115 - protein, 285 aa, Homo sapiens
MSEAGEEQPMETTGATENGHEAVPEGESPAGAGTGAAAGAGGATAAPPSGNQNGAEGDQINASKNEEDAGKMFVGGLSWDTSKKDLKDYFTKFGEVVDCTIKMDPNTGRSRGFGFILFKDAASVEKVLDQKEHRLDGRVIDPKKAMAMKKDPVKKIFVGGLNPEATEEKIREYFGEFGEIEAIELPMDPKLNKRRGFVFITFKEEEPVKKVLEKKFHTVSGSKCEIKVAQPKEVYQQQQYGSGGRGNRNRGNRGSGGGGGGGGQGSTNYGKSQRRGGHQNNYKPY

SEQ ID NO: 116 - protein, 1032 aa, Homo sapiens
MAETNNECSIKVLCRFRPLNQAEILRGDKFIPIFQGDDSVVIGGKPYVFDRVFPPNTTQEQVYHACAMQIVKDVLAGYNGTIFAYGQTSSGKTHTMEGKLHDPQLMGIIPRIARDIFNHIYSMDENLEFHIKVSYFEIYLDKIRDLLDVTKTNLSVHEDKNRVPFVKGCTERFVSSPEEILDVIDEGKSNRHVAVTNMNEHSSRSHSIFLINIKQENMETEQKLSGKLYLVDLAGSEKVSKTGAEGAVLDEAKNINKSLSALGNVISALAEGTKSYVPYRDSKMTRILQDSLGGNCRTTMFICCSPSSYNDAETKSTLMFGQRAKTIKNTASVNLELTAEQWKKKYEKEKEKTKAQKETIAKLEAELSRWRNGENVPETERLAGEEAALGAELCEETPVNDNSSIVVRIAPEERQKYEEEIRRLYKQLDDKDDEINQQSQLIEKLKQQMLDQEELLVSTRGDNEKVQRELSHLQSENDAAKDEVKEVLQALEELAVNYDQKSQEVEEKSQQNQLLVDELSQKVATMLSLESELQRLQEVSGHQRKRIAEVLNGLMKDLSEFSVIVGNGEIKLPVEISGAIEEEFTVARLYISKIKSEVKSVVKRCRQLENLQVECHRKMEVTGRELSSCQLLISQHEAKIRSLTEYMQSVELKKRHLEESYDSLSDELAKLQAQETVHEVALKDKEPDTQDADEVKKALELQMESHREAHHRQLARLRDEINEKQKTIDELKDLNQKLQLELEKLQADYEKLKSEEHEKSTKLQELTFLYERHEQSKQDLKGLEETVARELQTLHNLRKLFVQDVTTRVKKSAEMEPEDSGGIHSQKQKISFLENNLEQLTKVHKQLVRDNADLRCELPKLEKRLRATAERVKALEGALKEAKEGAMKDKRRYQQEVDRIKEAVRYKSSGKRGHSAQIAKPVRPGHYPASSPTNPYGTRSPECISYTNSLFQNYQNLYLQATPSSTSDMYFANSCTSSGATSSGGPLASYQKANMDNGNATDINDNRSDLPCGYEAEDQAKLFPLHQETAAS

SEQ ID NO: 117 - protein, 248 aa, Homo sapiens
MFRFMRDVEPEDPMFLMDPFAIHRQHMSRMLSGGFGYSPFLSITDGNMPGTRPASRRMQQAGAVSPFGMLGMSGGFMDMFGMMNDMIGNMEHMTAGGNCQTFSSSTVISYSNTGDGAPKVYQETSEMRSAPGGIRETRRTVRDSDSGLEQMSIGHHIRDRAHILQRSRNHRTGDQEERQDYINLDESEAAAFDDEWRRETSRFRQQRPLEFRRLESSGAGGRRAEGPPRLAIQGPEDSPSRQSRRYDW

SEQ ID NO: 118 - protein, 725 aa, Homo sapiens
MVMKASVDDDDSGWELSMPEKMEKSNTNWVDITQDFEEACRELKLGELLHDKLFGLFEAMSAIEMMDPKMDAGMIGNQVNRKVLNFEQAIKDGTIKIKDLTLPELIGIMDTCFCCLITWLEGHSLAQTVFTCLYIHNPDFIEDPAMKAFALGILKICDIAREKVNKAAVFEEEDFQSMTYGFKMANSVTDLRVTGMLKDVEDDMQRRVKSTRSRQGEERDPEVELEHQQCLAVFSRVKFTRVLLTVLIAFTKKETSAVAEAQKLMVQAADLLSAIHNSLHHGIQAQNDTTKGDHPIMMGFEPLVNQRLLPPTFPRYAKIIKREEMVNYFARLIDRIKTVCEVVNLTNLHCILDFFCEFSEQSPCVLSRSLLQTTFLVDNKKVFGTHLMQDMVKDALRSFVSPPVLSPKCYLYNNHQAKDCIDSFVTHCVRPFCSLIQIHGHNRARQRDKLGHILEEFATLQDEAEKVDAALHTMLLKQEPQRQHLACLGTWVLYHNLRIMIQYLLSGFELELYSMHEYYYIYWYLSEFLYAWLMSTLSRADGSQMAEERIMEEQQKGRSSKKTKKKKKVRPLSREITMSQAYQNMCAGMFKTMVAFDMDGKVRKPKFELDSEQVRYEHRFAPFNSVMTPPPVHYLQFKEMSDLNKYSPPPQSPELYVAASKHFQQAKMILENIPNPDHEVNRILKVAKPNFVVMKLLAGGHKKESKVPPEFDFSAHKYFPVVKLV

SEQ ID NO: 119 - protein, 1036 aa, Homo sapiens
MASSVGNVADSTGLAELAHREYQAGDFEAAERHCMQLWRQEPDNTGVLLLLSSIHFQCRRLDRSAHFSTLAIKQNPLLAEAYSNLGNVYKERGQLQEAIEHYRHALRLKPDFIDGYINLAAALVAAGDMEGAVQAYVSALQYNPDLYCVRSDLGNLLKALGRLEEAKACYLKAIETQPNFAVAWSNLGCVFNAQGEIWLAIHHFEKAVTLDPNFLDAYINLGNVLKEARIFDRAVAAYLRALSLSPNHAVVHGNLACVYYEQGLIDLAIDTYRRAIELQPHFPDAYCNLANALKEKGSVAEAEDCYNTALRLCPTHADSLNNLANIKREQGNIEEAVRLYRKALEVFPEFAAAHSNLASVLQQQGKLQEALMHYKEAIRISPTFADAYSNMGNTLKEMQDVQGALQCYTRAIQINPAFADAHSNLASIHKDSGNIPEAIASYRTALKLKPDFPDAYCNLAHCLQIVCDWTDYDERMKKLVSIVADQLEKNRLPSVHPHHSMLYPLSHGFRKAIAERHGNLCLDKINVLHKPPYEHPKDLKLSDGRLRVGYVSSDFGNHPTSHLMQSIPGMHNPDKFEVFCYALSPDDGTNFRVKVMAEANHFIDLSQIPCNGKAADRIHQDGIHILVNMNGYTKGARNELFALRPAPIQAMWLGYPGTSGALFMDYIITDQETSPAEVAEQYSEKLAYMPHTFFIGDHANMFPHLKKKAVIDFKSNGHIYDNRIVLNGIDLKAFLDSLPDVKIVKMKCPDGGDNADSSNTALNMPVIPMNTIAEAVIEMINRGQIQITINGFSISNGLATTQINNKAATGEEVPRTIIVTTRSQYGLPEDAIVYCNFNQLYKIDPSTLQMWANILKRVPNSVLWLLRFPAVGEPNIQQYAQNMGLPQNRIIFSPVAPKEEHVRRGQLADVCLDTPLCNGHTTGMDVLWAGTPMVTMPGETLASRVAASQLTCLGCLELIAKNRQEYEDIAVKLGTDLEYLKKVRGKVWKQRISSPLFNTKQYTMELERLYLQMWEHYAAGNKPDHMIKPVEVTESA

SEQ ID NO: 120 - protein, 408 aa, Homo sapiens
MTSTFNPRECKLSKQEGQNYGFFLRIEKDTEGHLVRVVEKCSPAEKAGLQDGDRVLRINGVFVDKEEHMQVVDLVRKSGNSVTLLVLDGDSYEKAVKTRVDLKELGQSQKEQGLSDNILSPVMNGGVQTWTQPRLCYLVKEGGSYGFSLKTVQGQIIKDIDSGSPAEEAGLKNNDLVVAVNGESVETLDHDSVVEMIRKGGDQTSLLVVDKETDNMYRLAHFSPFLYYQSQELPNGSVKEAPAPTPTSLEVSSPPDTTEEVDHKPKLCRLAKGENGYGFHLNAIRGLPGSFIKEVQKGGPADLAGLEDEDVIIEVNGVNVLDEPYEKVVDRIQSSGKNVTLLVCGKKAYDYFQAKKIPIVSSLADPLDTPPDSKEGIVVESNHDSHMAKERAHSTASHSSSNSEDTEM

SEQ ID NO: 121 - protein, 674 aa, Homo sapiens
MAPGQAPHQATPWRDAHPFFLLSPVMGLLSRAWSRLRGLGPLEPWLVEAVKGAALVEAGLEGEARTPLAIPHTPWGRRPEEEAEDSGGPGEDRETLGLKTSSSLPEAWGLLDDDDGMYGEREATSVPRGQGSQFADGQRAPLSPSLLIRTLQGSDKNPGEEKAEEEGVAEEEGVNKFSYPPSHRECCPAVEEEDDEEAVKKEAHRTSTSALSPGSKPSTWVSCPGEEENQATEDKRTERSKGARKTSVSPRSSGSDPRSWEYRSGEASEEKEEKAHKETGKGEAAPGPQSSAPAQRPQLKSWWCQPSDEEEGEVKALGAAEKDGEAECPPCIPPPSAFLKAWVYWPGEDTEEEEDEEEDEDSDSGSDEEEGEAEASSSTPATGVFLKSWVYQPGEDTEEEEDEDSDTGSAEDEREAETSASTPPASAFLKAWVYRPGEDTEEEEDEDVDSEDKEDDSEAALGEAESDPHPSHPDQRAHFRGWGYRPGKETEEEEAAEDWGEAEPCPFRVAIYVPGEKPPPPWAPPRLPLRLQRRLKRPETPTHDPDPETPLKARKVRFSEKVTVHFLAVWAGPAQAARQGPWEQLARDRSRFARRITQAQEELSPCLTPAARARAWARLRNPPLAPIPALTQTLPSSSVPSSPVQTTPLSQAVATPSRSSAAAAAALDLSGRRG

SEQ ID NO: 122 - protein, 980 aa, Homo sapiens
MVSKMIIENFEALKSWLSKTLEPICDADPSALAKYVLALVKKDKSEKELKALCIDQLDVFLQKETQIFVEKLFDAVNTKSYLPPPEQPSSGSLKVEFFPHQEKDIKKEEITKEEEREKKFSRRLNHSPPQSSSRYRENRSRDERKKDDRSRKRDYDRNPPRRDSYRDRYNRRRGRSRSYSRSRSRSWSKERLRERDRDRSRTRSRSRTRSRERDLVKPKYDLDRTDPLENNYTPVSSVPSISSGHYPVPTLSSTITVIAPTHHGNNTTESWSEFHEDQVDHNSYVRPPMPKKRCRDYDEKGFCMRGDMCPFDHGSDPVVVEDVNLPGMLPFPAQPPVVEGPPPPGLPPPPPILTPPPVNLRPPVPPPGPLPPSLPPVTGPPPPLPPLQPSGMDAPPNSATSSVPTVVTTGIHHQPPPAPPSLFTADTYDTDGYNPEAPSITNTSRPMYRHRVHAQRPNLIGLTSGDMDLPPREKPPNKSSMRIVVDSESRKRTIGSGEPGVPTKKTWFDKPNFNRTNSPGFQKKVQFGNENTKLELRKVPPELNNISKLNEHFSRFGTLVNLQVAYNGDPEGALIQFATYEEAKKAISSTEAVLNNRFIKVYWHREGSTQQLQTTSPKPLVQQPILPVVKQSVKERLGPVPSSTIEPAEAQSASSDLPQVLSTSTGLTKTVYNPAALKAAQKTLLVSTSAVDNNEAQKKKQEALKLQQDVRKRKQEILEKHIETQKMLISKLEKNKTMKSEDKAEIMKTLEVLTKNITKLKDEVKAASPGRCLPKSIKTKTQMQKELLDTELDLYKKMQAGEEVTELRRKYTELQLEAAKRGILSSGRGRGIHSRGRGAVHGRGRGRGRGRGVPGHAVVDHRPRALEISAFTESDREDLLPHFAQYGEIEDCQIDDSSLHAVITFKTRAEAEAAAVHGARFKGQDLKLAWNKPVTNISAVETEEVEPDEEEFQEESLVDDSLLQDDDEEEEDNESRSWRR

SEQ ID NO: 123 - protein, 644 aa, Homo sapiens
MEAERGPERRPAERSSPGQTPEEGAQALAEFAALHGPALRASGVPERYWGRLLHKLEHEVFDAGEVFGIMQVEEVEEEEDEAAREVRKQQPNPGNELCYKVIVTRESGLQAAHPNSIFLIDHAWTCRVEHARQQLQQVPGLLHRMANLMGIEFHGELPSTEAVALVLEEMWKFNQTYQLAHGTAEEKMPVWYIMDEFGSRIQHADVPSFATAPFFYMPQQVAYTLLWPLRDLDTGEEVTRDFAYGETDPLIRKCMLLPWAPTDMLDLSSCTPEPPAEHYQAILEENKEKLPLDINPVVHPHGHIFKVYTDVQQVASSLTHPRFTLTQSEADADILFNFSHFKDYRKLSQERPGVLLNQFPCENLLTVKDCLASIARRAGGPEGPPWLPRTFNLRTELPQFVSYFQQRERWGEDNHWICKPWNLARSLDTHVTKSLHSIIRHRESTPKVVSKYIESPVLFLREDVGKVKFDIRYIVLLRSVRPLRLFVYDVFWLRFSNRAFALNDLDDYEKHFTVMNYDPDVVLKQVHCEEFIPEFEKQYPEFPWTDVQAEIFRAFTELFQVACAKPPPLGLCDYPSSRAMYAVDLMLKWDNGPDGRRVMQPQILEVNFNPDCERACRYHPTFFNDVFSTLFLDQPGGCHVTCLV

SEQ ID NO: 124 - protein, 400 aa, Homo sapiens
MSSPLASLSKTRKVPLPSEPMNPGRRGIRIYGDEDEVDMLSDGCGSEEKISVPSCYGGIGAPVSRQGDSLAPPEVDFDRLLASLQDLSELVVEGDTQVTPVPGGARLRTLEPIPLKLYRNGIMMFDGPFQPFYDPSTQRCLRDILDGFFPSELQRLYPNGVPFKVSDLRNQVYLEDGLDPFPGEGRVVGRQLMHKALDRVEEHPGSRMTAEKFLNRLPKFVIRQGEVIDIRGPIRDTLQNCCPLPARIQEIVVETPTLAAERERSQESPNTPAPPLSMLRIKSENGEQAFLLMMQPDNTIGDVRALLAQARVMDASAFEIFSTFPPTLYQDDTLTLQAAGLVPKAALLLRARRAPKSSLKFSPGPCPGPGPGPSPGPGPGPSPGPGPGPSPCPGPSPSPQ

SEQ ID NO: 125 - protein, 364 aa, Homo sapiens
MSLAGGRAPRKTAGNRLSGLLEAEEEDEFYQTTYGGFTEESGDDEYQGDQSDTEDEVDSDFDIDEGDEPSSDGEAEEPRRKRRVVTKAYKEPLKSLRPRKVNTPAGSSQKAREEKALLPLELQDDGSDSRKSMRQSTAEHTRQTFLRVQERQGQSRRRKGPHCERPLTQEELLREAKITEELNLRSLETYERLEADKKKQVHKKRKCPGPIITYHSVTVPLVGEPGPKEENVDIEGLDPAPSVSALTPHAGTGPVNPPARCSRTFITFSDDATFEEWFPQGRPPKVPVREVCPVTHRPALYRDPVTDIPYATARAFKIIREAYKKYITAHGLPPTASALGPGPPPPEPLPGSGPRALRQKIVIK

SEQ ID NO: 126 - protein, 562 aa, Homo sapiens
MDPQPPPPAQGSPPHRGRGRGRGRGRGRGRGRGRGGAGAPRAPLPCPTCGRLFRFPYYLSRHRLSHSGLRPHACPLCPKAFRRPAHLSRHLRGHGPQPPLRCAACPRTFPEPAQLRRHLAQEHAGGEVELAIERVAKETAEPSWGPQDEGSEPPTTAAAGATEEEAVAAWPETWPAGEPSTLAAPTSAAEPRESESEEAEAGAAELRAELALAAGRQEEKQVLLQADWTLLCLRCREAFATKGELKAHPCLRPEGEQEGEGGPPPRPKRHQCSICLKAFARPWSLSRHRLVHSTDRPFVCPDCGLAFRLASYLRQHRRVHGPLSLLAPLPAAGKKDDKASGARNSAKGPEGGEGAECGGASEGGEGQNGGDAAPARPPAGEPRFWCPECGKGFRRRAHLRQHGVTHSGARPFQCVRCQREFKRLADLARHAQVHAGGPAPHPCPRCPRRFSRAYSLLRHQRCHRAELERAAALQALQAQAPTSPPPPPPPLKAEQEEEGLPLPLANIKEEPPSPGTPPQSPPAPPVFLSASCFDSQDHSAFEMEEEEVDSKAHLRGLGGLAS

SEQ ID NO: 127 - protein, 189 aa, Homo sapiens
MNGLPSAEAPGGAGCALAGLPPLPRGLSGLLNASGGSWRELERVYSQRSRIHDELSRAARAPDGPRHAAGAANAGPAAGPRRPVNLDSALAALRKEMVGLRQLDMSLLCQLWGLYESIQDYKHLCQDLSFCQDLSSSLHSDSSYPPDAGLSDDEEPPDASLPPDPPPLTVPQTHNARDQWLQDAFHISL

SEQ ID NO: 128 - protein, 260 aa, Homo sapiens
MAGSPLLWGPRAGGVGLLVLLLLGLFRPPPALCARPVKEPRGLSAASPPLAETGAPRRFRRSVPRGEAAGAVQELARALAHLLEAERQERARAEAQEAEDQQARVLAQLLRVWGAPRNSDPALGLDDDPDAPAAQLARALLRARLDPAALAAQLVPAPVPAAALRPRPPVYDDGPAGPDAEEAGDETPDVDPELLRYLLGRILAGSADSEGVAAPRRLRRAADHDVGSELPPEGVLGALLRVKRLETPAPQVPARRLLPP

SEQ ID NO: 129 - protein, 875 aa, Homo sapiens
MDPAPSLGCSLKDVKWSSVAVPLDLLVSTYRLPQIARLDNGECVEGLRENDYLLIHSCRQWTTITAHSLEEGHYVIGPKIEIPVHYAGQFKLLEQDRDIKEPVQYFNSVEEVAKAFPERVYVMEDITFNVKVASGECNEDTEVYNITLCTGDELTLMGQAEILYAKTFKEKSRLNTIFKKIGKLNSISKLGKGKMPCLICMNHRTNESISLPFQCKGRFSTRSPLELQMQEGEHTIRNIVEKTRLPVNVTVPSPPPRNPYDLHFIREGHRYKFVNIQTKTVVVCCVLRNNKILPMHFPLHLTVPKFSLPEHLVKGESWPETLVHHWLGICQEQFDIDEYSRAVRDVKTDWNEECKSPKKGRCSGHNHVPNSLSYARDELTQSFHRLSVCVYGNNLHGNSEVNLHGCRDLGGDWAPFPHDILPYQDSGDSGSDYLFPEASEESAGIPGKSELPYEELWLEEGKPSHQPLTRSLSEKNRCDQFRGSVRSKCATSPLPIPGTLGAAVKSSDTALPPPPVPPKSEAVREECRLLNAPPVPPRSAKPLSTSPSIPPRTVKPARQQTRSPSPTLSYYSSGLHNIVTKTDTNPSESTPVSCYPCNRVKTDSVDLKSPFGSPSAEAVSSRLSWPNHYSGASESQTRSDFLLDPSRSYSYPRQKTPGTPKRNCPAPFDFDGCELLASPTSPVTAEFSSSVSGCPKSASYSLESTDVKSLAAGVTKQSTSCPALPPRAPKLVEEKVASETSPLPLKIDGAEEDPKSGSPDLSEDQYFVKKGMQDIFSASYPFSSPLHLQLAPRSCGDGSPWQPPADLSGLSIEEVSKSLRFIGLSEDVISFFVTEKIDGNLLVQLTEEILSEDFKLSKLQVKKIMQFINGWRPKI

SEQ ID NO: 130 - protein, 424 aa, Homo sapiens
MQRLQVVLGHLRGPADSGWMPQAAPCLSGAPQASAADVVVVHGRRTAICRAGRGGFKDTTPDELLSAVMTAVLKDVNLRPEQLGDICVGNVLQPGAGAIMARIAQFLSDIPETVPLSTVNRQCSSGLQAVASIAGGIRNGSYDIGMACGVESMSLADRGNPGNITSRLMEKEKARDCLIPMGITSENVAERFGISREKQDTFALASQQKAARAQSKGCFQAEIVPVTTTVHDDKGTKRSITVTQDEGIRPSTTMEGLAKLKPAFKKDGSTTAGNSSQVSDGAAAILLARRSKAEELGLPILGVLRSYAVVGVPPDIMGIGPAYAIPVALQKAGLTVSDVDIFEINEAFASQAAYCVEKLRLPPEKVNPLGGAVALGHPLGCTGARQVITLLNELKRRGKRAYGVVSMCIGTGMGAAAVFEYPGN

SEQ ID NO: 131 - protein, 1427 aa, Homo sapiens
MHQRHPRARCPPLCVAGILACGFLLGCWGPSHFQQSCLQALEPQAVSSYLSPGAPLKGRPPSPGFQRQRQRQRRAAGGILHLELLVAVGPDVFQAHQEDTERYVLTNLNIGAELLRDPSLGAQFRVHLVKMVILTEPEGAPNITANLTSSLLSVCGWSQTINPEDDTDPGHADLVLYITRFDLELPDGNRQVRGVTQLGGACSPTWSCLITEDTGFDLGVTIAHEIGHSFGLEHDGAPGSGCGPSGHVMASDGAAPRAGLAWSPCSRRQLLSLLSAGRARCVWDPPRPQPGSAGHPPDAQPGLYYSANEQCRVAFGPKAVACTFAREHLDMCQALSCHTDPLDQSSCSRLLVPLLDGTECGVEKWCSKGRCRSLVELTPIAAVHGRWSSWGPRSPCSRSCGGGVVTRRRQCNNPRPAFGGRACVGADLQAEMCNTQACEKTQLEFMSQQCARTDGQPLRSSPGGASFYHWGAAVPHSQGDALCRHMCRAIGESFIMKRGDSFLDGTRCMPSGPREDGTLSLCVSGSCRTFGCDGRMDSQQVWDRCQVCGGDNSTCSPRKGSFTAGRAREYVTFLTVTPNLTSVYIANHRPLFTHLAVRIGGRYVVAGKMSISPNTTYPSLLEDGRVEYRVALTEDRLPRLEEIRIWGPLQEDADIQVYRRYGEEYGNLTRPDITFTYFQPKPRQAWVWAAVRGPCSVSCGAGLRWVNYSCLDQARKELVETVQCQGSQQPPAWPEACVLEPCPPYWAVGDFGPCSASCGGGLRERPVRCVEAQGSLLKTLPPARCRAGAQQPAVALETCNPQPCPARWEVSEPSSCTSAGGAGLALENETCVPGADGLEAPVTEGPGSVDEKLPAPEPCVGMSCPPGWGHLDATSAGEKAPSPWGSIRTGAQAAHVWTPAAGSCSVSCGRGLMELRFLCMDSALRVPVQEELCGLASKPGSRREVCQAVPCPARWQYKLAACSVSCGRGVVRRILYCARAHGEDDGEEILLDTQCQGLPRPEPQEACSLEPCPPRWKVMSLGPCSASCGLGTARRSVACVQLDQGQDVEVDEAACAALVRPEASVPCLIADCTYRWHVGTWMECSVSCGDGIQRRRDTCLGPQAQAPVPADFCQHLPKPVTVRGCWAGPCVGQGTPSLVPHEEAAAPGRTTATPAGASLEWSQARGLLFSPAPQPRRLLPGPQENSVQSSACGRQHLEPTGTIDMRGPGQADCAVAIGRPLGEVVTLRVLESSLNCSAGDMLLLWGRLTWRKMCRKLLDMTFSSKTNTLVVRQRCGRPGGGVLLRYGSQLAPETFYRECDMQLFGPWGEIVSPSLSPATSNAGGCRLFINVAPHARIAIHALATNMGAGTEGANASYILIRDTHSLRTTAFHGQQVLYWESESSQAEMEFSEGFLKAQASLRGQYWTLQSWVPEMQDPQSWKGKEGT

SEQ ID NO: 132 - protein, 232 aa, Homo sapiens
MAPSVPAAEPEYPKGIRAVLLGPPGAGKGTQAPRLAENFCVCHLATGDMLRAMVASGSELGKKLKATMDAGKLVSDEMVVELIEKNLETPLCKNGFLLDGFPRTVRQAEMLDDLMEKRKEKLDSVIEFSIPDSLLIRRITGRLIHPKSGRSYHEEFNPPKEPMKDDITGEPLIRRSDDNEKALKIRLQAYHTQTTPLIEYYRKRGIHSAIDASQTPDVVFASILAAFSKATS

SEQ ID NO: 133 - protein, 640 aa, Homo sapiens
MESVVRRCPFLSRVPQAFLQKAGKSLLFYAQNCPKMMEVGAKPAPRALSTAAVHYQQIKETPPASEKDKTAKAKVQQTPDGSQQSPDGTQLPSGHPLPATSQGTASKCPFLAAQMNQRGSSVFCKASLELQEDVQEMNAVRKEVAETSAGPSVVSVKTDGGDPSGLLKNFQDIMQKQRPERVSHLLQDNLPKSVSTFQYDRFFEKKIDEKKNDHTYRVFKTVNRRAHIFPMADDYSDSLITKKQVSVWCSNDYLGMSRHPRVCGAVMDTLKQHGAGAGGTRNISGTSKFHVDLERELADLHGKDAALLFSSCFVANDSTLFTLAKMMPGCEIYSDSGNHASMIQGIRNSRVPKYIFRHNDVSHLRELLQRSDPSVPKIVAFETVHSMDGAVCPLEELCDVAHEFGAITFVDEVHAVGLYGARGGGIGDRDGVMPKMDIISGTLGKAFGCVGGYIASTSSLIDTVRSYAAGFIFTTSLPPMLLAGALESVRILKSAEGRVLRRQHQRNVKLMRQMLMDAGLPVVHCPSHIIPVRVADAAKNTEVCDELMSRHNIYVQAINYPTVPRGEELLRIAPTPHHTPQMMNYFLENLLVTWKQVGLELKPHSSAECNFCRRPLHFEVMSEREKSYFSGLSKLVSAQA

SEQ ID NO: 134 - protein, 194 aa, Homo sapiens
MRGSGLRFQMKMFESADSTATRSGQDLWAEICSCLPNPEQEDGANNAFSDSFVDSCPEGEGQREVADFAVQPAVKPWAPLQDSEVYLASLEKKLRRIKGLNQEVTSKDMLRTLAQAKKECWDRFLQEKLASEFFVDGLDSDESTLEHFKRWLQPDKVAVSTEEVQYLIPPESQVEKPVAEDEPAAGDKPAAAEQ

SEQ ID NO: 135 - protein, 441 aa, Homo sapiens
MRGLEESGPRPTATPCGCVKPALETGNLLTEPVGYLESCFSAKNGTPRQPSICSYSRACLRIRKRIFNNPEHSLMGLEQFSHVWILFVFHKNGHLSCKAKVQPPRLNGAKTGVFSTRSPHRPNAIGLTLAKLEKVEGGAIYLSGIDMIHGTPVLDIKPYIAEYDSPQNVMEPLADFNLQNNQHTPNTVSQSDSKTDSCDQRQLSGCDEPQPHHSTKRKPKCPEDRTSEENYLTHSDTARIQQAFPMHREIAVDFGLESRRDQSSSVAEEQIGPYCPEKSFSEKGTDKKLERVEGAAVLQGSRAETQPMAPHCPAGRADGAPRSVVPAWVTEAPVATLEVRFTPHAEMDLGQLSSQDVGQASFKYFQSAEEAKRAIEAVLSADPRSVYRRKLCQDRLFYFTVDIAHVTCWFGDGFAEVLRIKPASEPVHMTGPVGSLVSLGS

SEQ ID NO: 136 - protein, 1912 aa, Homo sapiens
MASGLGSPSPCSAGSEEEDMDALLNNSLPPPHPENEEDPEEDLSETETPKLKKKKKPKKPRDPKIPKSKRQKKERMLLCRQLGDSSGEGPEFVEEEEEVALRSDSEGSDYTPGKKKKKKLGPKKEKKSKSKRKEEEEEEDDDDDSKEPKSSAQLLEDWGMEDIDHVFSEEDYRTLTNYKAFSQFVRPLIAAKNPKIAVSKMMMVLGAKWREFSTNNPFKGSSGASVAAAAAAAVAVVESMVTATEVAPPPPPVEVPIRKAKTKEGKGPNARRKPKGSPRVPDAKKPKPKKVAPLKIKLGGFGSKRKRSSSEDDDLDVESDFDDASINSYSVSDGSTSRSSRSRKKLRTTKKKKKGEEEVTAVDGYETDHQDYCEVCQQGGEIILCDTCPRAYHMVCLDPDMEKAPEGKWSCPHCEKEGIQWEAKEDNSEGEEILEEVGGDLEEEDDHHMEFCRVCKDGGELLCCDTCPSSYHIHCLNPPLPEIPNGEWLCPRCTCPALKGKVQKILIWKWGQPPSPTPVPRPPDADPNTPSPKPLEGRPERQFFVKWQGMSYWHCSWVSELQLELHCQVMFRNYQRKNDMDEPPSGDFGGDEEKSRKRKNKDPKFAEMEERFYRYGIKPEWMMIHRILNHSVDKKGHVHYLIKWRDLPYDQASWESEDVEIQDYDLFKQSYWNHRELMRGEEGRPGKKLKKVKLRKLERPPETPTVDPTVKYERQPEYLDATGGTLHPYQMEGLNWLRFSWAQGTDTILADEMGLGKTVQTAVFLYSLYKEGHSKGPFLVSAPLSTIINWEREFEMWAPDMYVVTYVGDKDSRAIIRENEFSFEDNAIRGGKKASRMKKEASVKFHVLLTSYELITIDMAILGSIDWACLIVDEAHRLKNNQSKFFRVLNGYSLQHKLLLTGTPLQNNLEELFHLLNFLTPERFHNLEGFLEEFADIAKEDQIKKLHDMLGPHMLRRLKADVFKNMPSKTELIVRVELSPMQKKYYKYILTRNFEALNARGGGNQVSLLNVVMDLKKCCNHPYLFPVAAMEAPKMPNGMYDGSALIRASGKLLLLQKMLKNLKEGGHRVLIFSQMTKMLDLLEDFLEHEGYKYERIDGGITGNMRQEAIDRFNAPGAQQFCFLLSTRAGGLGINLATADTVIIYDSDWNPHNDIQAFSRAHRIGQNKKVMIYRFVTRASVEERITQVAKKKMMLTHLVVRPGLGSKTGSMSKQELDDILKFGTEELFKDEATDGGGDNKEGEDSSVIHYDDKAIERLLDRNQDETEDTELQGMNEYLSSFKVAQYVVREEEMGEEEEVEREIIKQEESVDPDYWEKLLRHHYEQQQEDLARNLGKGKRIRKQVNYNDGSQEDRDWQDDQSDNQSDYSVASEEGDEDFDERSEAPRRPSRKGLRNDKDKPLPPLLARVGGNIEVLGFNARQRKAFLNAIMRYGMPPQDAFTTQWLVRDLRGKSEKEFKAYVSLFMRHLCEPGADGAETFADGVPREGLSRQHVLTRIGVMSLIRKKVQEFEHVNGRWSMPELAEVEENKKMSQPGSPSPKTPTPSTPGDTQPNTPAPVPPAEDGIKIEENSLKEEESIEGEKEVKSTAPETAIECTQAPAPASEDEKVVVEPPEGEEKVEKAEVKERTEEPMETEPKGAADVEKVEEKSAIDLTPIVVEDKEEKKEEEEKKEVMLQNGETPKDLNDEKQKKNIKQRFMFNIADGGFTELHSLWQNEERAATVTKKTYEIWHRRHDYWLLAGIINHGYARWQDIQNDPRYAILNEPFKGEMNRGNFLEIKNKFLARRFKLLEQALVIEEQLRRAAYLNMSEDPSHPSMALNTRFAEVECLAESHQHLSKESMAGNKPANAVLHKVLKQLEELLSDMKADVTRLPATIARIPPVAVRLQMSERNILSRLANRAPEPTPQQVAQQQ

SEQ ID NO: 137 - protein, 1556 aa, Homo sapiens
MADRSLEGMALPLEVRARLAELELELSEGDITQKGYEKKRSKLIGAYLPQPPRVDQALPQERRAPVTPSSASRYHRRRSSGSRDERYRSDVHTEAVQAALAKHKERKMAVPMPSKRRSLVVQTSMDAYTPPDTSSGSEDEGSVQGDSQGTPTSSQGSINMEHWISQAIHGSTTSTTSSSSTQSGGSGAAHRLADVMAQTHIENHSAPPDVTTYTSEHSIQVERPQGSTGSRTAPKYGNAELMETGDGVPVSSRVSAKIQQLVNTLKRPKRPPLREFFVDDFEELLEVQQPDPNQPKPEGAQMLAMRGEQLGVVTNWPPSLEAALQRWGTISPKAPCLTTMDTNGKPLYILTYGKLWTRSMKVAYSILHKLGTKQEPMVRPGDRVALVFPNNDPAAFMAAFYGCLLAEVVPVPIEVPLTRKDAGSQQIGFLLGSCGVTVALTSDACHKGLPKSPTGEIPQFKGWPKLLWFVTESKHLSKPPRDWFPHIKDANNDTAYIEYKTCKDGSVLGVTVTRTALLTHCQALTQACGYTEAETIVNVLDFKKDVGLWHGILTSVMNMMHVISIPYSLMKVNPLSWIQKVCQYKAKVACVKSRDMHWALVAHRDQRDINLSSLRMLIVADGANPWSISSCDAFLNVFQSKGLRQEVICPCASSPEALTVAIRRPTDDSNQPPGRGVLSMHGLTYGVIRVDSEEKLSVLTVQDVGLVMPGAIMCSVKPDGVPQLCRTDEIGELCVCAVATGTSYYGLSGMTKNTFEVFPMTSSGAPISEYPFIRTGLLGFVGPGGLVFVVGKMDGLMVVSGRRHNADDIVATALAVEPMKFVYRGRIAVFSVTVLHDERIVIVAEQRPDSTEEDSFQWMSRVLQAIDSIHQVGVYCLALVPANTLPKTPLGGIHLSETKQLFLEGSLHPCNVLMCPHTCVTNLPKPRQKQPEIGPASVMVGNLVSGKRIAQASGRDLGQIEDNDQARKFLFLSEVLQWRAQTTPDHILYTLLNCRGAIANSLTCVQLHKRAEKIAVMLMERGHLQDGDHVALVYPPGIDLIAAFYGCLYAGCVPITVRPPHPQNIATTLPTVKMIVEVSRSACLMTTQLICKLLRSREAAAAVDVRTWPLILDTDDLPKKRPAQICKPCNPDTLAYLDFSVSTTGMLAGVKMSHAATSAFCRSIKLQCELYPSREVAICLDPYCGLGFVLWCLCSVYSGHQSILIPPSELETNPALWLLAVSQYKVRDTFCSYSVMELCTKGLGSQTESLKARGLDLSRVRTCVVVAEERPRIALTQSFSKLFKDLGLHPRAVSTSFGCRVNLAICLQGTSGPDPTTVYVDMRALRHDRVRLVERGSPHSLPLMESGKILPGVRIIIANPETKGPLGDSHLGEIWVHSAHNASGYFTIYGDESLQSDHFNSRLSFGDTQTIWARTGYLGFLRRTELTDANGERHDALYVVGALDEAMELRGMRYHPIDIETSVIRAHKSVTECAVFTWTNLLVVVVELDGSEQEALDLVPLVTNVVLEEHYLIVGVVVVVDIGVIPINSRGEKQRMHLRDGFLADQLDPIYVAYNM

SEQ ID NO: 138 - protein, 361 aa, Homo sapiens
MSTAREQPIFSTRAHVFQIDPATKRNWIPAGKHALTVSYFYDATRNVYRIISIGGAKAIINSTVTPNMTFTKTSQKFGQWADSRANTVYGLGFASEQHLTQFAEKFQEVKEAARLAREKSQDGGELTSPALGLASHQVPPSPLVSANGPGEEKLFRSQSADAPGPTERERLKKMLSEGSVGEVQWEAEFFALQDSNNKLAGALREANAAAAQWRQQLEAQRAEAERLRQRVAELEAQAASEVTPTGEKEGLGQGQSLEQLEALVQTKDQEIQTLKSQTGGPREALEAAEREETQQKVQDLETRNAELEHQLRAMERSLEEARAERERARAEVGRAAQLLDVSLFELSELREGLARLAEAAP

SEQ ID NO: 139 - protein, 282 aa, Homo sapiens
MERPSLRALLLGAAGLLLLLLPLSSSSSSDTCGPCEPASCPPLPPLGCLLGETRDACGCCPMCARGEGEPCGGGGAGRGYCAPGMECVKSRKRRKGKAGAAAGGPGVSGVCVCKSRYPVCGSDGTTYPSGCQLRAASQRAESRGEKAITQVSKGTCEQGPSIVTPPKDIWNVTGAQVYLSCEVIGIPTPVLIWNKVKRGHYGVQRTELLPGDRDNLAIQTRGGPEKHEVTGWVLVSPLSKEDAGEYECHASNSQGQASASAKITVVDALHEIPVKKGEGAEL

SEQ ID NO: 140 - protein, 271 aa, Homo sapiens
MRQLHPEAIAAIQSKALFSKAEEQLLSKVGSTSQPTLETFQDLLHRHPDAFYLARTAKALQAHWQLMKQYYLLEDQTVQPLPKGDQVLNFSDAEDLIDDSKLKDMRDEVLEHELMVADRRQKREIRQLEQELHKWQVLVDSITGMSSPDFDNQTLAVLRGRMVRYLMRSREITLGRATKDNQIDVDLSLEGPAWKISRKQGVIKLKNNGDFFIANEGRRPIYIDGRPVLCGSKWRLSNNSVVEIASLRFVFLINQDLIALIRAEAAKITPQ

SEQ ID NO: 141 - protein, 301 aa, Homo sapiens
MQREEKQLEASLDALLSQVADLKNSLGSFICKLENEYGRLTWPSVLDSFALLSGQLNTLNKVLKHEKTPLFRNQVIIPLVLSPDRDEDLMRQTEGRVPVFSHEVVPDHLRTKPDPEVEEQEKQLTTDAARIGADAAQKQIQSLNKMCSNLLEKISKEERESESGGLRPNKQTFNPTDTNALVAAVAFGKGLSNWRPSGSSGPGQAGQPGAGTILAGTSGLQQVQMAGAPSQQQPMLSGVQMAQAGQPGKMPSGIKTNIKSASMHPYQRPSCLGFILAIPLRRKVKKLLGQEGKKNAHLQLW

SEQ ID NO: 142 - protein, 192 aa, Homo sapiens [sequence omitted]

SEQ ID NO: 143 - protein, 539 aa, Homo sapiens
MPGQRRALSPKMASMRESDTGLWLHNKLGATDELWAPPSIASLLTAAVIDNIRLCFHGLSSAVKLKLLLGTLHLPRRTVDEMKGALMEIIQLASLDSDPWVLMVADILKSFPDTGSLNLELEEQNPNVQDILGELREKVGECEASAMLPLECQYLNKNALTTLAGPLTPPVKHFQLKRKPKSATLRAELLQKSTETAQQLKRSAGVPFHAKGRGLLRKMDTTTPLKGIPKQAPFRSPTAPSVFSPTGNRTPIPPSRTLLRKERGVKLLDISELDMVGAGREAKRRRKTLDAEVVEKPAKEETVVENATPDYAAGLVSTQKLGSLNNEPALPSTSYLPSTPSVVPASSYIPSSETPPAPSSREASRPPEEPSAPSPTLPAQFKQRAPMYNSGLSPATPTPAAPTSPLTPTTPPAVAPTTQTPPVAMVAPQTQAPAQQQPKKNLSLTREQMFAAQEMFKTANKVTRPEKALILGFMAGSRENPCQEQGDVIQIKLSEHTEDLPKADGQGSTTMLVDTVFEMNYATGQWTRFKKYKPMTNVS

SEQ ID NO: 144 - protein, 558 aa, Homo sapiens
MAIPGRQYGLILPKKTQQLHPVLQKPSVFGNDSDDDDETSVSESLQREAAKKQAMKQTKLEIQKALAEDATVYEYDSIYDEMQKKKEENNPKLLLGKDRKPKYIHNLLKAVEIRKKEQEKRMEKKIQREREMEKGEFDDKEAFVTSAYKKKLQERAEEEEREKRAAALEACLDVTKQKDLSGFYRHLLNQAVGEEEVPKCSFREARSGIKEEKSRGFSNEVSSKNRIPQEKCILQTDVKVEENPDADSDFDAKSSADDEIEETRVNCRREKVIETPENDFKHHRSQNHSRSPSEERGHSTRHHTKGSRTSRGHEKREDQHQQKQSRDQENHYTDRDYRKERDSHRHREASHRDSHWKRHEQEDKPRARDQRERSDRVWKREKDREKYSQREQERDRQQNDQNRPSEKGEKEEKSKAKEEHMKVRKERYENNDKYRDREKREVGVQSSERNQDRKESSPNSRAKDKFLDQERSNKMRNMAKDKERNQEKPSNSESSLGAKHRLTEEGQEKGKEQERPPEAVSKFAKRNNEETVMSARDRYLARQMARVNAKTYIEKEDD

SEQ ID NO: 145 - protein, 133 aa, Homo sapiens
MLSPEAERVLRYLVEVEELAEEVLADKRQIVDLDTKRNQNREGLRALQKDLSLSEDVMVCFGNMFIKMPHPETKEMIEKDQDHLDKEIEKLRKQLKVKVNRLFEAQGKPELKGFNLNPLNQDELKALKVILKG

SEQ ID NO: 146 - protein, 382 aa, Homo sapiens
MGAFLDKPKMEKHNAQGQGNGLRYGLSSMQGWRVEMEDAHTAVIGLPSGLESWSFFAVYDGHAGSQVAKYCCEHLLDHITNNQDFKGSAGAPSVENVKNGIRTGFLEIDEHMRVMSEKKHGADRSGSTAVGVLISPQHTYFINCGDSRGLLCRNRKVHFFTQDHKPSNPLEKERIQNAGGSVMIQRVNGSLAVSRALGDFDYKCVHGKGPTEQLVSPEPEVHDIERSEEDDQFIILACDGIWDVMGNEELCDFVRSRLEVTDDLEKVCNEVVDTCLYKGSRDNMSVILICFPNAPKVSPEAVKKEAELDKYLECRVEEIIKKQGEGVPDLVHVMRTLASENIPSLPPGGELASKRNVIEAVYNRLNPYKNDDTDSTSTDDMW

SEQ ID NO: 147 - protein, 477 aa, Homo sapiens
MAMAEGERTECAEPPRDEPPADGALKRAEELKTQANDYFKAKDYENAIKFYSQAIELNPSNAIYYGNRSLAYLRTECYGYALGDATRAIELDKKYIKGYYRRAASNMALGKFRAALRDYETVVKVKPHDKDAKMKYQECNKIVKQKAFERAIAGDEHKRSVVDSLDIESMTIEDEYSGPKLEDGKVTISFMKELMQWYKDQKKLHRKCAYQTEKITVCGDTHGQFYDLLNIFELNGLPSETNPYIFNGDFVDRGSFSVEVILTLFGFKLLYPDHFHLLRGNHETDNMNQIYGFEGEVKAKYTAQMYELFSEVFEWLPLAQCINGKVLIMHGGLFSEDGVTLDDIRKIERNRQPPDSGPMCDLLWSDPQPQNGRSISKRGVSCQFGPDVTKAFLEENNLDYIIRSHEVKAEGYEVAHGGRCVTVFSAPNYCDQMGNKASYIHLQGSDLRPQFHQFTAVPHPNVKPMAYANTLLQLGMM

SEQ ID NO: 148 - protein, 460 aa, Homo sapiens
MPFLKANEVTDSAYMGSESTYSECETFTDEDTSTLVHPELQPEGDADSAGGSAVPSECLDAMEEPDHGALLLLPGRPHPHGQSVITVIGGEEHFEDYGEGSEAELSPETLCNGQLGCSDPAFLTPSPTKRLSSKKVARYLHQSGALTMEALEDPSPELMEGPEEDIADKVVFLERRVLELEKDTAATGEQHSRLRQENLQLVHRANALEEQLKEQELRACEMVLEETRRQKELLCKMEREKSIEIENLQTRLQQLDEENSELRSCTPCLKANIERLEEEKQKLLDEIESLTLRLSEEQENKRRMGDRLSHERHQFQRDKEATQELIEDLRKQLEHLQLLKLEAEQRRGRSSSMGLQEYHSRARESELEQEVRRLKQDNRNLKEQNEELNGQIITLSIQGAKSLFSTAFSESLAAEISSVSRDELMEAIQKQEEINFRLQDYIDRIIVAIMETNPSILEVK

SEQ ID NO: 149 - protein, 1312 aa, Homo sapiens
MSRIEKMSILGVRSFGIEDKDKQIITFFSPLTILVGPNGAGKTTIIECLKYICTGDFPPGTKGNTFVHDPKVAQETDVRAQIRLQFRDVNGELIAVQRSMVCTQKSKKTEFKTLEGVITRTKHGEKVSLSSKCAEIDREMISSLGVSKAVLNNVIFCHQEDSNWPLSEGKALKQKFDEIFSATRYIKALETLRQVRQTQGQKVKEYQMELKYLKQYKEKACEIRDQITSKEAQLTSSKEIVKSYENELDPLKNRLKEIEHNLSKIMKLDNEIKALDSRKKQMEKDNSELEEKMEKVFQGTDEQLNDLYHNHQRTVREKERKLVDCHRELEKLNKESRLLNQEKSELLVEQGRLQLQADRHQEHIRARDSLIQSLATQLELDGFERGPFSERQIKNFHKLVRERQEGEAKTANQLMNDFAEKETLKQKQIDEIRDKKTGLGRIIELKSEILSKKQNELKNVKYELQQLEGSSDRILELDQELIKAERELSKAEKNSNVETLKMEVISLQNEKADLDRTLRKLDQEMEQLNHHTTTRTQMEMLTKDKADKDEQIRKIKSRHSDELTSLLGYFPNKKQLEDWLHSKSKEINQTRDRLAKLNKELASSEQNKNHINNELKRKEEQLSSYEDKLFDVCGSQDFESDLDRLKEEIEKSSKQRAMLAGATAVYSQFITQLTDENQSCCPVCQRVFQTEAELQEVISDLQSKLRLAPDKLKSTESELKKKEKRRDEMLGLVPMRQSIIDLKEKEIPELRNKLQNVNRDIQRLKNDIEEQETLLGTIMPEEESAKVCLTDVTIMERFQMELKDVERKIAQQAAKLQGIDLDRTVQQVNQEKQEKQHKLDTVSSKIELNRKLIQDQQEQIQHLKSTTNELKSEKLQISTNLQRRQQLEEQTVELSTEVQSLYREIKDAKEQVSPLETTLEKFQQEKEELINKKNTSNKIAQDKLNDIKEKVKNIHGYMKDIENYIQDGKDDYKKQKETELNKVIAQLSECEKHKEKINEDMRLMRQDIDTQKIQERWLQDNLTLRKRNEELKEVEEERKQHLKEMGQMQVLQMKSEHQKLEENIDNIKRNHNLALGRQKGYEEEIIHFKKELREPQFRDAEEKYREMMIVMRTTELVNKDLDIYYKTLDQAIMKFHSMKMEEINKIIRDLWRSTYRGQDIEYIEIRSDADENVSASDKRRNYNYRVVMLKGDTALDMRGRCSAGQKVLASLIIRLALAETFCLNCGIIALDEPTTNLDRENIESLAHALVEIIKSRSQQRNFQLLVITHDEDFVELLGRSEYVEKFYRIKKNIDQCSEIVKCSVSSLGFNVH

SEQ ID NO: 150 - protein, 313 aa, Homo sapiens
MDNKKRLAYAIIQFLHDQLRHGGLSSDAQESLEVAIQCLETAFGVTVEDSDLALPQTLPEIFEAAATGKEMPQDLRSPARTPPSEEDSAEAERLKTEGNEQMKVENFEAAVHFYGKAIELNPANAVYFCNRAAAYSKLGNYAGAVQDCERAICIDPAYSKAYGRMGLALSSLNKHVEAVAYYKKALELDPDNETYKSNLKIAELKLREAPSPTGGVGSFDIAGLLNNPGFMSMASNLMNNPQIQQLMSGMISGGNNPLGTPGTSPSQNDLASLIQAGQQFAQQMQQQNPELIEQLRSQIRSRTPSASNDDQQE

SEQ ID NO: 151 - protein, 464 aa, Homo sapiens
MRAARRGLHCAGAERPRRRGRLWDSSGVPQRQKRPGPWRTQTQEQMSRDVCIHTWPCTYYLEPKRRWVTGQLSLTSLSLRFMTDSTGEILVSFPLSSIVEIKKEASHFIFSSITILEKGHAKHWFSSLRPSRNVVFSIIEHFWRELLLSQPGAVADASVPRTRGEELTGLMAGSQKRLEDTARVLHHQGQQLDSVMRGLDKMESDLEVADRLLTELESPAWWPFSSKLWKTPPETKPREDVSMTSCEPFGKEGILIKIPAVISHRTESHVKPGRLTVLVSGLEIHDSSSLLMHRFEREDVDDIKVHSPYEISIRQRFIGKPDMAYRLISAKMPEVIPILEVQFSKKMELLEDALVLRSARTSSPAEKSCSVWHAASGLMGRTLHREPPAGDQEGTALHLQTSLPALSEADTQELTQILRRMKGLALEAESELERQDEALDGVAAAVDRATLTIDKHNRRMKRLT

SEQ ID NO: 152 - protein, 3267 aa, Homo sapiens
MQKARGTRGEDAGTRAPPSPGVPPKRAKVGAGGGAPVAVAGAPVFLRPLKNAAVCAGSDVRLRVVVSGTPQPSLRWFRDGQLLPAPAPEPSCLWLRRCGAQDAGVYSCMAQNERGRASCEAVLTVLEVGDSETAEDDISDVQGTQRLELRDDGAFSTPTGGSDTLVGTSLDTPPTSVTGTSEEQVSWWGSGQTVLEQEAGSGGGTRRLPGSPRQAQATGAGPRHLGVEPLVRASRANLVGASWGSEDSLSVASDLYGSAFSLYRGRALSIHVSVPQSGLRREEPDLQPQLASEAPRRPAQPPPSKSALLPPPSPRVGKRSPPGPPAQPAATPTSPHRRTQEPVLPEDTTTEEKRGKKSKSSGPSLAGTAESRPQTPLSEASGRLSALGRSPRLVRAGSRILDKLQFFEERRRSLERSDSPPAPLRPWVPLRKARSLEQPKSERGAPWGTPGASQEELRAPGSVAERRRLFQQKAASLDERTRQRSPASDLELRFAQELGRIRRSTSREELVRSHESLRATLQRAPSPREPGEPPLFSRPSTPKTSRAVSPAAAQPPSPSSAEKPGDEPGRPRSRGPAGRTEPGEGPQQEVRRRDQFPLTRSRAIQECRSPVPPPAADPPEARTKAPPGRKREPPAQAVRFLPWATPGLEGAAVPQTLEKNRAGPEAEKRLRRGPEEDGPWGPWDRRGARSQGKGRRARPTSPELESSDDSYVSAGEEPLEAPVFEIPLQNVVVAPGADVLLKCIITANPPPQVSWHKDGSALRSEGRLLLRAEGERHTLLLREARAADAGSYMATATNELGQATCAASLTVRPGGSTSPFSSPITSDEEYLSPPEEFPEPGETWPRTPTMKPSPSQNRRSSDTGSKAPPTFKVSLMDQSVREGQDVIMSIRVQGEPKPVVSWLRNRQPVRPDQRRFAEEAEGGLCRLRILAAERGDAGFYTCKAVNEYGARQCEARLEVRAHPESRSLAVLAPLQDVDVGAGEMALFECLVAGPTDVEVDWLCRGRLLQPALLKCKMHFDGRKCKLLLTSVHEDDSGVYTCKLSTAKDELTCSARLTVRPSLAPLFTRLLEDVEVLEGRAARFDCKISGTPPPVVTWTHFGCPMEESENLRLRQDGGLHSLHIAHVGSEDEGLYAVSAVNTHGQAHCSAQLYVEEPRTAASGPSSKLEKMPSIPEEPEQGELERLSIPDFLRPLQDLEVGLAKEAMLECQVTGLPYPTISWFHNGHRIQSSDDRRMTQYRDVHRLVFPAVGPQHAGVYKSVIANKLGKAACYAHLYVTDVVPGPPDGAPQVVAVTGRMVTLTWNPPRSLDMAIDPDSLTYTVQHQVLGSDQWTALVTGLREPGWAATGLRKGVQHIFRVLSTTVKSSSKPSPPSEPVQLLEHGPTLEEAPAMLDKPDIVYVVEGQPASVTVTFNHVEAQVVWRSCRGALLEARAGVYELSQPDDDQYCLRICRVSRRDMGALTCTARNRHGTQTCSVTLELAEAPRFESIMEDVEVGAGETARFAVVVEGKPLPDIMWYKDEVLLTESSHVSFVYEENECSLVVLSTGAQDGGVYTCTAQNLAGEVSCKAELAVHSAQTAMEVEGVGEDEDHRGRRLSDFYDIHQEIGRGAFSYLRRIVERSSGLEFAAKFIPSQAKPKASARREARLLARLQHDCVLYFHEAFERRRGLVIVTELCTEELLERIARKPTVCESEIRAYMRQVLEGIHYLHQSHVLHLDVKPENLLVWDGAAGEQQVRICDFGNAQELTPGEPQYCQYGTPEFVAPEIVNQSPVSGVTDIWPVGVVAFLCLTGISPFVGENDRTTLMNIRNYNVAFEETTFLSLSREARGFLIKVLVQDRLRPTAEETLEHPWFKTQAKGAEVSTDHLKLFLSRRRWQRSQISYKCHLVLRPIPELLRAPPERVWVTMPRRPPPSGGLSSSSDSEEEELEELPSVPRPLQPEFSGSRVSLTDIPTEDEALGTPETGAATPMDWQEQGRAPSQDQEAPSPEALPSPGQEPAAGASPRRGELRRGSSAESALPRAGPRELGRGLHKAASVELPQRRSPSPGATRLARGGLGEGEYAQRLQALRQRLLRGGPEDGKVSGLRGPLLESLGGRARDPRMARAASSEAAPHHQPPLENRGLQKSSSFSQGEAEPRGRHRRAGAPLEIPVARLGARRLQESPSLSALSEAQPSSPARPSAPKPSTPKSAEPSATTPSDAPQPPAPQPAQDKAPEPRPEPVRASKPAPPPQALQTLALPLTPYAQIIQSLQLSGHAQGPSQGPAAPPSEPKPHAAVFARVASPPPGAPEKRVPSAGGPPVLAEKARVPTVPPRPGSSLSSSIENLESEAVFEAKFKRSRESPLSLGLRLLSRSRSEERGPFRGAEEEDGIYRPSPAGTPLELVRRPERSRSVQDLRAVGEPGLVRRLSLSLSQRLRRTPPAQRHPAWEARGGDGESSEGGSSARGSPVLAMRRRLSFTLERLSSRLQRSGSSEDSGGASGRSTPLFGRLRRATSEGESLRRLGLPHNQLAAQAGATTPSAESLGSEASATSGSSAPGESRSRLRWGFSRPRKDKGLSPPNLSASVQEELGHQYVRSESDFPPVFHIKLKDQVLLEGEAATLLCLPAACPAPHISWMKDKKSLRSEPSVIIVSCKDGRQLLSIPRAGKRHAGLYECSATNVLGSITSSCTVAVARVPGKLAPPEVPQTYQDTALVLWKPGDSRAPCTYTLERRVDGESVWHPVSSGIPDCYYNVTHLPVGVTVRFRVACANRAGQGPFSNSSEKVFVRGTQDSSAVPSAAHQEAPVTSRPARARPPDSPTSLAPPLAPAAPTPPSVTVSPSSPPTPPSQALSSLKAVGPPPQTPPRRHRGLQAARPAEPTLPSTHVTPSEPKPFVLDTGTPIPASTPQGVKPVSSSTPVYVVTSFVSAPPAPEPPAPEPPPEPTKVTVQSLSPAKEVVSSPGSSPRSSPRPEGTTLRQGPPQKPYTFLEEKARGRFGVVRACRENATGRTFVAKIVPYAAEGKRRVLQEYEVLRTLHHERIMSLHEAYITPRYLVLIAESCGNRELLCGLSDRFRYSEDDVATYMVQLLQGLDYLHGHHVLHLDIKPDNLLLAPDNALKIVDFGSAQPYNPQALRPLGHRTGTLEFMAPEMVKGEPIGSATDIWGAGVLTYIMLSGRSPFYEPDPQETEARIVGGRFDAFQLYPNTSQSATLFLRKVLSVHPWSRPSLQDCLAHPWLQDAYLMKLRRQTLTFTTNRLKEFLGEQRRRRAEAATRHKVLLRSYPGGP

SEQ ID NO: 153 - protein, 405 aa, Homo sapiens
MFVQEEKIFAGKVLRLHICASDGAEWLEEATEDTSVEKLKERCLKHCAHGSLEDPKSITHHKLIHAASERVLSDARTILEENIQDQDVLLLIKKRAPSPLPKMADVSAEEKKKQDQKAPDKEAILRATANLPSYNMDRAAVQTNMRDFQTELRKILVSLIEVAQKLLALNPDAVELFKKANAMLDEDEDERVDEAALRQLTEMGFPENRATKALQLNHMSVPQAMEWLIEHAEDPTIDTPLPGQAPPEAEGATAAASEAAAGASATDEEARDELTEIFKKIRRKREFRADARAVISLMEMGFDEKEVIDALRVNNNQQNAACEWLLGDRKPSPEELDKGIDPDSPLFQAILDNPVVQLGLTNPKTLLAFEDMLENPLNSTQWMNDPETGPVMLQISRIFQTLNRT

SEQ ID NO: 154 - protein, 470 aa, Homo sapiens
MKEEKEHRPKEKRVTLLTPAGATGSGGGTSGDSSKGEDKQDRNKEKKEALSKVVIRRLPPTLTKEQLQEHLQPMPEHDYFEFFSNDTSLYPHMYARAYINFKNQEDIILFRDRFDGYVFLDNKGQEYPAIVEFAPFQKAAKKKTKKRDTKVGTIDDDPEYRKFLESYATDNEKMTSTPETLLEEIEAKNRELIAKKTTPLLSFLKNKQRMREEKREERRRREIERKRQREEERRKWKEEEKRKRKDIEKLKKIDRIPERDKLKDEPKIKLLKKPEKGDEKELDKREKAKKLDKENLSDERASGQSCTLPKRSDSELKDEKPKRPEDESGRDYREREREYERDQERILRERERLKRQEEERRRQKERYEKEKTFKRKEEEMKKEKDTLRDKGKKAESTESIGSSEKTEKKEEVVKRDRIRNKDRPAMQLYQPGARSRNRLCPPDDSTKSGDSAAERKQESGISHRKEGGEE

SEQ ID NO: 155 - protein, 459 aa, Homo sapiens
MAASGAVEPGPPGAAVAPSPAPAPPPAPDHLFRPISAEDEEQQPTEIESLCMNCYCNGMTRLLLTKIPFFREIIVSSFSCEHCGWNNTEIQSAGRIQDQGVRYTLSVRALEDMNREVVKTDSAATRIPELDFEIPAFSQKGALTTVEGLITRAISGLEQDQPARRANKDATAERIDEFIVKLKELKQVASPFTLIIDDPSGNSFVENPHAPQKDDALVITHYNRTRQQEEMLGLQEEAPAEKPEEEDLRNEVLQFSTNCPECNAPAQTNMKLVQIPHFKEVIIMATNCENCGHRTNEVKSGGAVEPLGTRITLHITDASDMTRDLLKSETCSVEIPELEFELGMAVLGGKFTTLEGLLKDIRELVTKNPFTLGDSSNPGQTERLQEFSQKMDQIIEGNMKAHFIMDDPAGNSYLQNVYAPEDDPEMKVERYKRTFDQNEELGLNDMKTEGYEAGLAPQR

SEQ ID NO: 156 - protein, 397 aa, Homo sapiens
MNAGSDPVVIVSAARTIIGSFNGALAAVPVQDLGSTVIKEVLKRATVAPEDVSEVIFGHVLAAGCGQNPVRQASVGAGIPYSVPAWSCQMICGSGLKAVCLAVQSIGIGDSSIVVAGGMENMSKAPHLAYLRTGVKIGEMPLTDSILCDGLTDAFHNCHMGITAENVAKKWQVSREDQDKVAVLSQNRTENAQKAGHFDKEIVPVLVSTRKGLIEVKTDEFPRHGSNIEAMSKLKPYFLTDGTGTVTPANASGINDGAAAVVLMKKSEADKRGLTPLARIVSWSQVGVEPSIMGIGPIPAIKQAVTKAGWSLEDVDIFEINEAFAAVSAAIVKELGLNPEKVNIEGGAIALGHPLGASGCRILVTLLHTLERMGRSRGVAALCIGGGMGIAMCVQRE

SEQ ID NO: 157 - protein, 317 aa, Homo sapiens [sequence omitted]

SEQ ID NO: 158 - protein, 292 aa, Homo sapiens
MRVDSSADPTMSQEQGPGSSTPPSSPTLLDALLQNLYDFGGTEGETEQKKIIKKRENKKRDVMASAALAAEPSPLPGSLIRGQRKSASSFFKELREERHCAPSGTPTGPEILAAAVPPSSLKNNREQVEVVEFHSNKKRKLTPDHNKNTKANPSVLERDVDTQEFNLEKARLEVHRFGITGYGKGKERILEQERAIMLGAKPPKKSYVNYKVLQEQIKEKKAAKEEEKRLAQETDIFKKKKRKGQEDRKSKKKSAPSILSNGRIGQVGKFKNGTLILSPVDIKKINSSRVAK

SEQ ID NO: 159 - protein, 302 aa, Homo sapiens
MVARGLVREAREDLEVHQAKLKEVRDRLDRVSREDSQYLELATLEHRMLQEEKRLRTAYLRAEDSEREKFSLFSAAVRESHEKERTRAERTKNWSLIGSVLGALIGVAGSTYVNRVRLQELKALLLEAQKGPVSLQEAIREQASSYSRQQRDLHNLMVDLRGLVHAAGPGQDSGSQAGSPPTRDRDVDVLSAALKEQLSHSRQVHSCLEGLREQLDGLEKTCSQMAGVVQLVKSAAHPGLVEPADGAMPSFLLEQGSMILALSDTEQRLEAQVNRNTIYSTLVTCVTFVATLPVLYMLFKAS

SEQ ID NO: 160 - protein, 1392 aa, Homo sapiens
MSMLKPSGLKAPTKILKPGSTALKTPTAVVAPVEKTISSEKASSTPSSETQEEFVDDFRVGERVWVNGNKPGFIQFLGETQFAPGQWAGIVLDEPIGKNDGSVAGVRYFQCEPLKGIFTRPSKLTRKVQAEDEANGLQTTPASRATSPLCTSTASMVSSSPSTPSNIPQKPSQPAAKEPSATPPISNLTKTASESISNLSEAGSIKKGERELKIGDRVLVGGTKAGVVRFLGETDFAKGEWCGVELDEPLGKNDGAVAGTRYFQCQPKYGLFAPVHKVTKIGFPSTTPAKAKANAVRRVMATTSASLKRSPSASSLSSMSSVASSVSSRPSRTGLLTETSSRYARKISGTTALQEALKEKQQHIEQLLAERDLERAEVAKATSHVGEIEQELALARDGHDQHVLELEAKMDQLRTMVEAADREKVELLNQLEEEKRKVEDLQFRVEEESITKGDLEVATVSEKSRIMELEKDLALRVQEVAELRRRLESNKPAGDVDMSLSLLQEISSLQEKLEVTRTDHQREITSLKEHFGAREETHQKEIKALYTATEKLSKENESLKSKLEHANKENSDVIALWKSKLETAIASHQQAMEELKVSFSKGLGTETAEFAELKTQIEKMRLDYQHEIENLQNQQDSERAAHAKEMEALRAKLMKVIKEKENSLEAIRSKLDKAEDQHLVEMEDTLNKLQEAEIKVKELEVLQAKCNEQTKVIDNFTSQLKATEEKLLDLDALRKASSEGKSEMKKLRQQLEAAEKQIKHLEIEKNAESSKASSITRELQGRELKLTNLQENLSEVSQVKETLEKELQILKEKFAEASEEAVSVQRSMQETVNKLHQKEEQFNMLSSDLEKLRENLADMEAKFREKDEREEQLIKAKEKLENDIAEIMKMSGDNSSQLTKMNDELRLKERDVEELQLKLTKANENASFLQKSIEDMTVKAEQSQQEAAKKHEEEKKELERKLSDLEKKMETSHNQCQELKARYERATSETKTKHEEILQNLQKTLLDTEDKLKGAREENSGLLQELEELRKQADKAKAAQTAEDAMQIMEQMTKEKTETLASLEDTKQTNAKLQNELDTLKENNLKNVEELNKSKELLTVENQKMEEFRKEIETLKQAAAQKSQQLSALQEENVKLAEELGRSRDEVTSHQKLEEERSVLNNQLLEMKKRESKFIKDADEEKASLQKSISITSALLTEKDAELEKLRNEVTVLRGENASAKSLHSVVQTLESDKVKLELKVKNLELQLKENKRQLSSSSGNTDTQADEDERAQESQIDFLNSVIVDLQRKNQDLKMKVEMMSEAALNGNGDDLNNYDSDDQEKQSKKKPRLFCDICDCFDLHDTEDCPTQAQMSEDPPHSTHHGSRGEERPYCEICEMFGHWATNCNDDETF

SEQ ID NO: 161 - protein, 656 aa, Homo sapiens
MEGDGSDPEPPDAGEDSKSENGENAPIYCICRKPDINCFMIGCDNCNEWFHGDCIRITEKMAKAIREWYCRECREKDPKLEIRYRHKKSRERDGNERDSSEPRDEGGGRKRPVPDPDLQRRAGSGTGVGAMLARGSASPHKSSPQPLVATPSQHHQQQQQQIKRSARMCGECEACRRTEDCGHCDFCRDMKKFGGPNKIRQKCRLRQCQLRARESYKYFPSSLSPVTPSESLPRPRRPLPTQQQPQPSQKLGRIREDEGAVASSTVKEPPEATATPEPLSDEDLPLDPDLYQDFCAGAFDDHGLPWMSDTEESPFLDPALRKRAVKVKHVKRREKKSEKKKEERYKRHRQKQKHKDKWKHPERADAKDPASLPQCLGPGCVRPAQPSSKYCSDDCGMKLAANRIYEILPQRIQQWQQSPCIAEEHGKKLLERIRREQQSARTRLQEMERRFHELEAIILRAKQQAVREDEESNEGDSDDTDLQIFCVSCGHPINPRVALRHMERCYAKYESQTSFGSMYPTRIEGATRLFCDVYNPQSKTYCKRLQVLCPEHSRDPKVPADEVCGCPLVRDVFELTGDFCRLPKRQCNRHYCWEKLRRAEVDLERVRVWYKLDELFEQERNVRTAMTNRAGLLALMLHQTIQHDPLTTDLRSSADR

SEQ ID NO: 162 - protein, 1143 aa, Homo sapiens
MPPPRTREGRDRRDHHRAPSEEEALEKWDWNCPETRRLLEDAFFREEDYIRQGSEECQKFWTFFERLQRFQNLKTSRKEEKDPGQPKHSIPALADLPRTYDPRYRINLSVLGPATRGSQGLGRHLPAERVAEFRRALLHYLDFGQKQAFGRLAKLQRERAALPIAQYGNRILQTLKEHQVVVVAGDTGCGKSTQVPQYLLAAGFSHVACTQPRRIACISLAKRVGFESLSQYGSQVGYQIRFESTRSAATKIVFLTVGLLLRQIQREPSLPQYEVLIVDEVHERHLHNDFLLGVLQRLLPTRPDLKVILMSATINISLFSSYFSNAPVVQVPGRLFPITVVYQPQEAEPTTSKSEKLDPRPFLRVLESIDHKYPPEERGDLLVFLSGMAEISAVLEAAQTYASHTQRWVVLPLHSALSVADQDKVFDVAPPGVRKCILSTNIAETSVTIDGIRFVVDSGKVKEMSYDPQAKLQRLQEFWISQASAEQRKGRAGRTGPGVCFRLYAESDYDAFAPYPVPEIRRVALDSLVLQMKSMSVGDPRTFPFIEPPPPASLETAILYLRDQGALDSSEALTPIGSLLAQLPVDVVIGKMLILGSMFSLVEPVLTIAAALSVQSPFTRSAQSSPECAAARRPLESDQGDPFTLFNVFNAWVQVKSERSRNSRKWCRRRGIEEHRLYEMANLRRQFKELLEDHGLLAGAQAAQVGDSYSRLQQRRERRALHQLKRQHEEGAGRRRKVLRLQEEQDGGSSDEDRAGPAPPGASDGVDIQDVKFKLRHDLAQLQAAASSAQDLSREQLALLKLVLGRGLYPQLAVPDAFNSSRKDSDQIFHTQAKQGAVLHPTCVFAGSPEVLHAQELEASNCDGSRDDKDKMSSKHQLLSFVSLLETNKPYLVNCVRIPALQSLLLFSRSLDTNGDCSRLVADGWLELQLADSESAIRLLAASLRLRARWESALDRQLAHQAQQQLEEEEEDTPVSPKEVATLSKELLQFTASKIPYSLRRLTGLEVQNMYVGPQTIPATPHLPGLFGSSTLSPHPTKGGYAVTDFLTYNCLTNDTDLYSDCLRTFWTCPHCGLHAPLTPLERIAHENTCPQAPQDGPPGAEEAALETLQKTSVLQRPYHCEACGKDFLFTPTEVLRHRKQHV

SEQ ID NO: 163 - protein, 2047 aa, Homo sapiens
MAASERRAFAHKINRTVAAEVRKQVSRERSGSPHSSRRCSSSLGVPLTEVVEPLDFEDVLLSRPPDAEPGPLRDLVEFPADDLELLLQPRECRTTEPGIPKDEKLDAQVRAAVEMYIEDWVIVHRRYQYLSAAYSPVTTDTQRERQKGLPRQVFEQDASGDERSGPEDSNDSRRGSGSPEDTPRSSGASSIFDLRNLAADSLLPSLLERAAPEDVDRRNETLRRQHRPPALLTLYPAPDEDEAVERCSRPEPPREHFGQRILVKCLSLKFEIEIEPIFGILALYDVREKKKISENFYFDLNSDSMKGLLRAHGTHPAISTLARSAIFSVTYPSPDIFLVIKLEKVLQQGDISECCEPYMVLKEVDTAKNKEKLEKLRLAAEQFCTRLGRYRMPFAWTAVHLANIVSSAGQLDRDSDSEGERRPAWTDRRRRGPQDRASSGDDACSFSGFRPATLTVTNFFKQEAERLSDEDLFKFLADMRRPSSLLRRLRPVTAQLKIDISPAPENPHFCLSPELLHIKPYPDPRGRPTKEILEFPAREVYAPHTSYRNLLYVYPHSLNFSSRQGSVRNLAVRVQYMTGEDPSQALPVIFGKSSCSEFTREAFTPVVYHNKSPEFYEEFKLHLPACVTENHHLLFTFYHVSCQPRPGTALETPVGFTWIPLLQHGRLRTGPFCLPVSVDQPPPSYSVLTPDVALPGMRWVDGHKGVFSVELTAVSSVHPQDPYLDKFFTLVHVLEEGAFPFRLKDTVLSEGNVEQELRASLAALRLASPEPLVAFSHHVLDKLVRLVIRPPIISGQIVNLGRGAFEAMAHVVSLVHRSLEAAQDARGHCPQLAAYVHYAFRLPGTEPSLPDGAPPVTVQAATLARGSGRPASLYLARSKSISSSNPDLAVAPGSVDDEVSRILASKLLHEELALQWVVSSSAVREAILQHAWFFFQLMVKSMALHLLLGQRLDTPRKLRFPGRFLDDITALVGSVGLEVITRVHKDVELAEHLNASLAFFLSDLLSLVDRGFVFSLVRAHYKQVATRLQSSPNPAALLTLRMEFTRILCSHEHYVTLNLPCCPLSPPASPSPSVSSTTSQSSTFSSQAPDPKVTSMFELSGPFRQQHFLAGLLLTELALALEPEAEGAFLLHKKAISAVHSLLCGHDTDPRYAEATVKARVAELYLPLLSIARDTLPRLHDFAEGPGQRSRLASMLDSDTEGEGDIAGTINPSVAMAIAGGPLAPGSRASISQGPPTASRAGCALSAESSRTLLACVLWVLKNTEPALLQRWATDLTLPQLGRLLDLLYLCLAAFEYKGKKAFERINSLTFKKSLDMKARLEEAILGTIGARQEMVRRSRERSPFGNPENVRWRKSVTHWKQTSDRVDKTKDEMEHEALVEGNLATEASLVVLDTLEIIVQTVMLSEARESVLGAVLKVVLYSLGSAQSALFLQHGLATQRALVSKFPELLFEEDTELCADLCLRLLRHCGSRISTIRTHASASLYLLMRQNFEIGHNFARVKMQVTMSLSSLVGTTQNFSEEHLRRSLKTILTYAEEDMGLRDSTFAEQVQDLMFNLHMILTDTVKMKEHQEDPEMLIDLMYRIARGYQGSPDLRLTWLQNMAGKHAELGNHAEAAQCMVHAAALVAEYLALLEDHRHLPVGCVSFQNISSNVLEESAISDDILSPDEEGFCSGKHFTELGLVGLLEQAAGYFTMGGLYEAVNEVYKNLIPILEAHRDYKKLAAVHGKLQEAFTKIMHQSSGWERVFGTYFRVGFYGAHFGDLDEQEFVYKEPSITKLAEISHRLEEFYTERFGDDVVEIIKDSNPVDKSKLDSQKAYIQITYVEPYFDTYELKDRVTYFDRNYGLRTFLFCTPFTPDGRAHGELPEQHKRKTLLSTDHAFPYIKTRIRVCHREETVLTPVEVAIEDMQKKTRELAFATEQDPPDAKMLQMVLQGSVGPTVNQGPLEVAQVFLAEIPEDPKLFRHHNKLRLCFKDFCKKCEDALRKNKALIGPDQKEYHRELERNYCRLREALQPLLTQRLPQLMAPTPPGLRNSLNRASFRKADL

SEQ ID NO: 164 - protein, 1537 aa, Homo sapiens
MGEKLELRLKSPVGAEPAVYPWPLPVYDKHHDAAHEIIETIRWVCEEIPDLKLAMENYVLIDYDTKSFESMQRLCDKYNRAIDSIHQLWKGTTQPMKLNTRPSTGLLRHILQQVYNHSVTDPEKLNNYEPFSPEVYGETSFDLVAQMIDEIKMTDDDLFVDLGSGVGQVVLQVAAATNCKHHYGVEKADIPAKYAETMDREFRKWMKWYGKKHAEYTLERGDFLSEEWRERIANTSVIFVNNFAFGPEVDHQLKERFANMKEGGRIVSSKPFAPLNFRINSRNLSDIGTIMRVVELSPLKGSVSWTGKPVSYYLHTIDRTILENYFSSLKNPKLREEQEAARRRQQRESKSNAATPTKGPEGKVAGPADAPMDSGAEEEKAGAATVKKPSPSKARKKKLNKKGRKMAGRKRGRPKKMNTANPERKPKKNQTALDALHAQTVSQTAASSPQDAYRSPHSPFYQLPPSVQRHSPNPLLVAPTPPALQKLLESFKIQYLQFLAYTKTPQYKASLQELLGQEKEKNAQLLGAAQQLLSHCQAQKEEIRRLFQQKLDELGVKALTYNDLIQAQKEISAHNQQLREQSEQLEQDNRALRGQSLQLLKARCEELQLDWATLSLEKLLKEKQALKSQISEKQRHCLELQISIVELEKSQRQQELLQLKSCVPPDDALSLHLRGKGALGRELEPDASRLHLELDCTKFSLPHLSSMSPELSMNGQAAGYELCGVLSRPSSKQNTPQYLASPLDQEVVPCTPSHVGRPRLEKLSGLAAPDYTRLSPAKIVLRRHLSQDHTVPGRPAASELHSRAEHTKENGLPYQSPSVPGSMKLSPQDPRPLSPGALQLAGEKSSEKGLRERAYGSSGELITSLPISIPLSTVQPNKLPVSIPLASVVLPSRAERARSTPSPVLQPRDPSSTLEKQIGANAHGAGSRSLALAPAGFSYAGSVAISGALAGSPASLTPGAEPATLDESSSSGSLFATVGSRSSTPQHPLLLAQPRNSLPASPAHQLSSSPRLGGAAQGPLPEASKGDLPSDSGFSDPESEAKRRIVFTITTGAGSAKQSPSSKHSPLTASARGDCVPSHGQDSRRRGRRKRASAGTPSLSAGVSPKRRALPSVAGLFTQPSGSPLNLNSMVSNINQPLEITAISSPETSLKSSPVPYQDHDQPPVLKKERPLSQTNGAHYSPLTSDEEPGSEDEPSSARIERKIATISLESKSPPKTLENGGGLAGRKPAPAGEPVNSSKWKSTFSPISDIGLAKSADSPLQASSALSQNSLFTFRPALEEPSADAKLAAHPRKGFPGSLSGADGLSPGTNPANGCTFGGGLAADLSLHSFSDGASLPHKGPEAAGLSSPLSFPSQRGKEGSDANPFLSKRQLDGLAGLKGEGSRGKEAGEGGLPLCGPTDKTPLLSGKAAKARDREVDLKNGHNLFISAAAVPPGSLLSGPGLAPAASSAGGAASSAQTHRSFLGPFPPGPQFALGPMSLQANLGSVAGSSVLQSLFSSVPAAAGLVHVSSAATRLTNSHAMGSFSGVAGGTVGGN

SEQ ID NO: 165 - protein, 1160 aa, Homo sapiens
MASVWKRLQRVGKHASKFQFVASYQELMVECTKKWQPDKLVVVWTRRSRRKSSKAHSWQPGIKNPYRGVVVWPVPENIEITVTLFKDPHAEEFEDKEWTFVIENESPSGRRKALATSSINMKQYASPMPTQTDVKLKFKPLSKKVVSAALQFSLSCIFLREGKATDEDMQSLASLMSMKQADIGNLDDFEEDNEDDDENRVNQEEKAAKITELINKLNFLDEAEKDLATVNSNPFDDPDAAELNPFGDPDSEEPITETASPRKTEDSFYNNSYNPFKEVQTPQYLNPFDEPEAFVTIKDSPPQSTKRKNIRPVDMSKYLYADSSKTEEEELDESNPFYEPKSTPPPNNLVNPVQELETERRVKRKAPAPPVLSPKTGVLNENTVSAGKDLSTSPKPSPIPSPVLGRKPNASQSLLVWCKEVTKNYRGVKITNFTTSWRNGLSFCAILHHFRPDLIDYKSLNPQDIKENNKKAYDGFASIGISRLLEPSDMVLLAIPDKLTVMTYLYQIRAHFSGQELNVVQIEENSSKSTYKVGNYETDTNSSVDQEKFYAELSDLKREPELQQPISGAVDFLSQDDSVFVNDSGVGESESEHQTPDDHLSPSTASPYCRRTKSDTEPQKSQQSSGRTSGSDDPGICSNTDSTQAQVLLGKKRLLKAETLELSDLYVSDKKKDMSPPFICEETDEQKLQTLDIGSNLEKEKLENSRSLECRSDPESPIKKTSLSPTSKLGYSYSRDLDLAKKKHASLRQTESDPDADRTTLNHADHSSKIVQHRLLSRQEELKERARVLLEQARRDAALKAGNKHNTNTATPFCNRQLSDQQDEERRRQLRERARQLIAEARSGVKMSELPSYGEMAAEKLKERSKASGEQNSKLVDLKLKKLLEVQPQVANSPSSAAQKAVTESSEQDMKSGTEDLRTERLQKTTERFRNPVVFSKDSTVRKTQLQSFSQYIENRPEMKRQRSIQEDTKKGNEEKAAITETQRKPSEDEVLNKGFKDTSQYVVGELAALENEQKQIDTRAALVEKRLRYLMDTGRNTEEEEAMMQEWFMLVNKKNALIRRMNQLSLLEKEHDLERRYELLNRELRAMLAIEDWQKTEAQKRREQLLLDELVALVNKRDALVRDLDAQEKQAEEEDEHLERTLEQNKGKMAKKEEKCVLQ

SEQ ID NO: 166 - protein, 1382 aa, Homo sapiens
MPAYFQRPENALKRANEFLEVGKKQPALDVLYDVMKSKKHRTWQKIHEPIMLKYLELCVDLRKSHLAKEGLYQYKNICQQVNIKSLEDVVRAYLKMAEEKTEAAKEESQQMVLDIEDLDNIQTPESVLLSAVSGEDTQDRTDRLLLTPWVKFLWESYRQCLDLLRNNSRVERLYHDIAQQAFKFCLQYTRKAEFRKLCDNLRMHLSQIQRHHNQSTAINLNNPESQSMHLETRLVQLDSAISMELWQEAFKAVEDIHGLFSLSKKPPKPQLMANYYNKVSTVFWKSGNALFHASTLHRLYHLSREMRKNLTQDEMQRMSTRVLLATLSIPITPERTDIARLLDMDGIIVEKQRRLATLLGLQAPPTRIGLINDMVRFNVLQYVVPEVKDLYNWLEVEFNPLKLCERVTKVLNWVREQPEKEPELQQYVPQLQNNTILRLLQQVSQIYQSIEFSRLTSLVPFVDAFQLERAIVDAARHCDLQVRIDHTSRTLSFGSDLNYATREDAPIGPHLQSMPSEQIRNQLTAMSSVLAKALEVIKPAHILQEKEEQHQLAVTAYLKNSRKEHQRILARRQTIEERKERLESLNIQREKEELEQREAELQKVRKAEEERLRQEAKEREKERILQEHEQIKKKTVRERLEQIKKTELGAKAFKDIDIEDLEELDPDFIMAKQVEQLEKEKKELQERLKNQEKKIDYFERAKRLEEIPLIKSAYEEQRIKDMDLWEQQEEERITTMQLEREKALEHKNRMSRMLEDRDLFVMRLKAARQSVYEEKLKQFEERLAEERHNRLEERKRQRKEERRITYYREKEEEEQRRAEEQMLKEREERERAERAKREEELREYQERVKKLEEVERKKRQRELEIEERERRREEERRLGDSSLSRKDSRWGDRDSEGTWRKGPEADSEWRRGPPEKEWRRGEGRDEDRSHRRDEERPRRLGDDEDREPSLRPDDDRVPRRGMDDDRGPRRGPEEDRFSRRGADDDRPSWRNTDDDRPPRRIADEDRGNWRHADDDRPPRRGLDEDRGSWRTADEDRGPRRGMDDDRGPRRGGADDERSSWRNADDDRGPRRGLDDDRGPRRGMDDDRGPRRGMDDDRGPRRGMDDDRGPRRGLDDDRGPWRNADDDRIPRRGAEDDRGPWRNMDDDRLSRRADDDRFPRRGDDSRPGPWRPLVKPGGWREKEKAREESWGPPRESRPSEEREWDREKERDRDNQDREENDKDPERERDRERDVDREDRFRRPRDEGGWRRGPAEESSSWRDSSRRDDRDRDDRRRERDDRRDLRERRDLRDDRDRRGPPLRSEREEVSSWRRADDRKDDRVEERDPPRRVPPPALSRDRERDRDREREGEKEKASWRAEKDRESLRRTKNETDEDGWTTVRR

SEQ ID NO: 167 - protein, 869 aa, Homo sapiens
MESAIAEGGASRFSASSGGGGSRGAPQHYPKTAGNSEFLGKTPGQNAQKWIPARSTRRDDNSAANNSANEKERHDAIFRKVRGILNKLTPEKFDKLCLELLNVGVESKLILKGVILLIVDKALEEPKYSSLYAQLCLRLAEDAPNFDGPAAEGQPGQKQSTTFRRLLISKLQDEFENRTRNVDVYDKRENPLLPEEEEQRAIAKIKMLGNIKFIGELGKLDLIHESILHKCIKTLLEKKKRVQLKDMGEDLECLCQIMRTVGPRLDHERAKSLMDQYFARMCSLMLSKELPARIRFLLQDTVELREHHWVPRKAFLDNGPKTINQIRQDAVKDLGVFIPAPMAQGMRSDFFLEGPFMPPRMKMDRDPLGGLADMFGQMPGSGIGTGPGVIQDRFSPTMGRHRSNQLFNGHGGHIMPPTQSQFGEMGGKFMKSQISLRPAQSFLMNKNQVPKLQPQITMIPPSAQPPRTQTPPLGQTPQLGLKTNPPLIQEKPAKTSKKPPPSKEELLKLTETVVTEYLNSGNANEAVNGVREMRAPKHFLPEMLSKVIILSLDRSDEDKEKASSLISLLKQEGIATSDNFMQAFLNVLDQCPKLEVDIPLVKSYLAQFAARAIISELVSISELAQPLESGTHFPLFLLCLQQLAKLQDREWLTELFQQSKVNMQKMLPEIDQNKDRMLEILEGKGLSFLFPLLKLEKELLKQIKLDPSPQTIYKWIKDNISPKLHVDKGFVNILMTSFLQYISSEVNPPSDETDSSSAPSKEQLEQEKQLLLSFKPVMQKFLHDHVDLQVSALYALQVHCYNSNFPKGMLLRFFVHFYDMEIIEEEAFLAWKEDITQEFPGKGKALFQVNQWLTWLETAEEEESEEEAD

SEQ ID NO: 168 - protein, 233 aa, Homo sapiens
MWSGLLPPGLNESDAESNSEDEATLENSGLNLQEDKEDESIRKTEIIDFSTDEPKTETESNVNAYEECPSGIPIDMWNKFQELHKKHSEQKSTTSRFRGKRRKRSRKDKLKNEKELHSEPSSNETQWKELTQYFGVNDRFDPPVKRKKVEKSGLEKRIDQAVEEWNIEKAEELSNQLATRELGVKIAKAVACHNFVKAKKEVENSQAARKKKKLAWGFEAKKRWETKSNMGYM

SEQ ID NO: 169 - protein, 370 aa, Homo sapiens
MNVTPEVKSRGMKFAEEQLLKHGWTQGKGLGRKENGITQALRVTLKQDTHGVGHDPAKEFTNHWWNELFNKTAANLVVETGQDGVQIRSLSKETTRYNHPKPNLLYQKFVKMATLTSGGEKPNKDLESCSDDDNQGSKSPKILTDEMLLQACEGRTAHKAARLGITMKAKLARLEAQEQAFLARLKGQDPGAPQLQSESKPPKKKKKKRRQKEEEEATASERNDADEKHPEHAEQNIRKSKKKKRRHQEGKVSDEREGTTKGNEKEDAAGTSGLGELNSREQTNQSLRKGKKKKRWHHEEEKMGVLEEGGKGKEAAGSVRTEEVESRAYADPCSRRKKRQQQEEEDLNLEDRGEETFRWWNQGSREQSMQ

SEQ ID NO: 170 - protein, 148 aa, Homo sapiens
MRGRELPLVLLALVLCLAPRGRAVPLPAGGGTVLTKMYPRGNHWAVGHLMGKKSTGESSSVSERGSLKQQLREYIRWEEAARNLLGLIEAKENRNHQPPQPKALGNQQPSWDSEDSSNFKDVGSKGKVGRLSAPGSQREGRNPQLNQQ

SEQ ID NO: 171 - protein, 259 aa, Homo sapiens
MAACRALKAVLVDLSGTLHIEDAAVPGAQEALKRLRGASVIIRFVTNTTKESKQDLLERLRKLEFDISEDEIFTSLTAARSLLERKQVRPMLLVDDRALPDFKGIQTSDPNAVVMGLAPEHFHYQILNQAFRLLLDGAPLIAIHKARYYKRKDGLALGPGPFVTALEYATDTKATVVGKPEKTFFLEALRGTGCEPEEAVMIGDDCRDDVGGAQDVGMLGILVKTGKYRASDEEKINPPPYLTCESFPHAVDHILQHLL

SEQ ID NO: 172 - protein, 392 aa, Homo sapiens
MDLFGDLPEPERSPRPAAGKEAQKGPLLFDDLPPASSTDSGSGGPLLFDDLPPASSGDSGSLATSISQMVKTEGKGAKRKTSEEEKNGSEELVEKKVCKASSVIFGLKGYVAERKGEREEMQDAHVILNDITEECRPPSSLITRVSYFAVFDGHGGIRASKFAAQNLHQNLIRKFPKGDVISVEKTVKRCLLDTFKHTDEEFLKQASSQKPAWKDGSTATCVLAVDNILYIANLGDSRAILCRYNEESQKHAALSLSKEHNPTQYEERMRIQKAGGNVRDGRVLGVLEVSRSIGDGQYKRCGVTSVPDIRRCQLTPNDRFILLACDGLFKVFTPEEAVNFILSCLEDEKIQTREGKSAADARYEAACNRLANKAVQRGSADNVTVMVVRIGH

SEQ ID NO: 173 - protein, 167 aa, Homo sapiens
MAAAGAFRLRRAASALLLRSPRLPARELSAPARLYHKKVVDHYENPRNVGSLDKTSKNVGTGLVGAPACGDVMKLQIQVDEKGKIVDARFKTFGCGSAIASSSLATEWVKGKTVEEALTIKNTDIAKELCLPPVKLHCSMLAEDAIKAALADYKLKQEPKKGEAEKK

SEQ ID NO: 174 - protein, 1771 aa, Homo sapiens
MSVLISQSVINYVEEENIPALKALLEKCKDVDERNECGQTPLMIAAEQGNLEIVKELIKNGANCNLEDLDNWTALISASKEGHVHIVEELLKCGVNLEHRDMGGWTALMWACYKGRTDVVELLLSHGANPSVTGLYSVYPIIWAAGRGHADIVHLLLQNGAKVNCSDKYGTTPLVWAARKGHLECVKHLLAMGADVDQEGANSMTALIVAVKGGYTQSVKEILKRNPNVNLTDKDGNTALMIASKEGHTEIVQDLLDAGTYVNIPDRSGDTVLIGAVRGGHVEIVRALLQKYADIDIRGQDNKTALYWAVEKGNATMVRDILQCNPDTEICTKDGETPLIKATKMRNIEVVELLLDKGAKVSAVDKKGDTPLHIAIRGRSRKLAELLLRNPKDGRLLYRPNKAGETPYNIDCSHQKSILTQIFGARHLSPTETDGDMLGYDLYSSALADILSEPTMQPPICVGLYAQWGSGKSFLLKKLEDEMKTFAGQQIEPLFQFSWLIVFLTLLLCGGLGLLFAFTVHPNLGIAVSLSFLALLYIFFIVIYFGGRREGESWNWAWVLSTRLARHIGYLELLLKLMFVNPPELPEQTTKALPVRFLFTDYNRLSSVGGETSLAEMIATLSDACEREFGFLATRLFRVFKTEDTQGKKKWKKTCCLPSFVIFLFIIGCIISGITLLAIFRVDPKHLTVNAVLISIASVVGLAFVLNCRTWWQVLDSLLNSQRKRLHNAASKLHKLKSEGFMKVLKCEVELMARMAKTIDSFTQNQTRLVVIIDGLDACEQDKVLQMLDTVRVLFSKGPFIAIFASDPHIIIKAINQNLNSVLRDSNINGHDYMRNIVHLPVFLNSRGLSNARKFLVTSATNGDVPCSDTTGIQEDADRRVSQNSLGEMTKLGSKTALNRRDTYRRRQMQRTITRQMSFDLTKLLVTEDWFSDISPQTMRRLLNIVSVTGRLLRANQISFNWDRLASWINLTEQWPYRTSWLILYLEETEGIPDQMTLKTIYERISKNIPTTKDVEPLLEIDGDIRNFEVFLSSRTPVLVARDVKVFLPCTVNLDPKLREIIADVRAAREQISIGGLAYPPLPLHEGPPRAPSGYSQPPSVCSSTSFNGPFAGGVVSPQPHSSYYSGMTGPQHPFYNRPFFAPYLYTPRYYPGGSQHLISRPSVKTSLPRDQNNGLEVIKEDAAEGLSSPTDSSRGSGPAPGPVVLLNSLNVDAVCEKLKQIEGLDQSMLPQYCTTIKKANINGRVLAQCNIDELKKEMNMNFGDWHLFRSTVLEMRNAESHVVPEDPRFLSESSSGPAPHGEPARRASHNELPHTELSSQTPYTLNFSFEELNTLGLDEGAPRHSNLSWQSQTRRTPSLSSLNSQDSSIEISKLTDKVQAEYRDAYREYIAQMSQLEGGPGSTTISGRSSPHSTYYMGQSSSGGSIHSNLEQEKGKDSEPKPDDGRKSFLMKRGDVIDYSSSGVSTNDASPLDPITEEDEKSDQSGSKLLPGKKSSERSSLFQTDLKLKGSGLRYQKLPSDEDESGTEESDNTPLLKDDKDRKAEGKVERVPKSPEHSAEPIRTFIKAKEYLSDALLDKKDSSDSGVRSSESSPNHSLHNEVADDSQLEKANLIELEDDSHSGKRGIPHSLSGLQDPIIARMSICSEDKKSPSECSLIASSPEENWPACQKAYNLNRTPSTVTLNNNSAPANRANQNFDEMEGIRETSQVILRPSSSPNPTTIQNENLKSMTHKRSQRSSYTRLSKDPPELHAAASSESTGFGEERESIL

SEQ ID NO: 175 - protein, 430 aa, Homo sapiens
MSFTTRSTFSTNYRSLGSVQAPSYGARPVSSAASVYAGAGGSGSRISVSRSTSFRGGMGSGGLATGIAGGLAGMGGIQNEKETMQSLNDRLASYLDRVRSLETENRRLESKIREHLEKKGPQVRDWSHYFKIIEDLRAQIFANTVDNARIVLQIDNARLAADDFRVKYETELAMRQSVENDIHGLRKVIDDTNITRLQLETEIEALKEELLFMKKNHEEEVKGLQAQIASSGLTVEVDAPKSQDLAKIMADIRAQYDELARKNREELDKYWSQQIEESTTVVTTQSAEVGAAETTLTELRRTVQSLEIDLDSMRNLKASLENSLREVEARYALQMEQLNGILLHLESELAQTRAEGQRQAQEYEALLNIKVKLEAEIATYRRLLEDGEDFNLGDALDSSNSMQTIQKTTTRRIVDGKVVSETNDTKVLRH

SEQ ID NO: 176 - protein, 172 aa, Homo sapiens
MAGSVADSDAVVKLDDGHLNNSLSSPVQADVYFPRLIVPFCGHIKGGMRPGKKVLVMGIVDLNPESFAISLTCGDSEDPPADVAIELKAVFTDRQLLRNSCISGERGEEQSAIPYFPFIPDQPFRVEILCEHPRFRVFVDGHQLFDFYHRIQTLSAIDTIKINGDLQITKLG

SEQ ID NO: 177 - protein, 534 aa, Homo sapiens
MRLRGCGPRAAPASSAGASDARLLAPPGRNPFVHELRLSALQKAQVALMTLTLFPVRLLVAAAMMLLAWPLALVASLGSAEKEPEQPPALWRKVVDFLLKAIMRTMWFAGGFHRVAVKGRQALPTEAAILTLAPHSSYFDAIPVTMTMSSIVMKAESRDIPIWGTLIQYIRPVFVSRSDQDSRRKTVEEIKRRAQSNGKWPQIMIFPEGTCTNRTCLITFKPGAFIPGAPVQPVVLRYPNKLDTITWTWQGPGALEILWLTLCQFHNQVEIEFLPVYSPSEEEKRNPALYASNVRRVMAEALGVSVTDYTFEDCQLALAEGQLRLPADTCLLEFARLVRGLGLKPEKLEKDLDRYSERARMKGGEKIGIAEFAASLEVPVSDLLEDMFSLFDESGSGEVDLRECVVALSVVCRPARTLDTIQLAFKMYGAQEDGSVGEGDLSCILKTALGVAELTVTDLFRAIDQEEKGKITFADFHRFAEMYPAFAEEYLYPDQTHFESCAETSPAPIPNGFCADFSPENSDAGRKPVRKKLD

SEQ ID NO: 178 - protein, 317 aa, Homo sapiens
MAEPGSRESETRARSPSVAAMASPQLCRALVSAQWVAEALRAPRAGQPLQLLDASWYLPKLGRDARREFEERHIPGAAFFDIDQCSDRTSPYDHMLPGAEHFAEYAGRLGVGAATHVVIYDASDQGLYSAPRVWWMFRAFGHHAVSLLDGGLRHWLRQNLPLSSGKSQPAPAEFRAQLDPAFIKTYEDIKENLESRRFQVVDSRATGRFRGTEPEPRDGIEPGHIPGTVNIPFTDFLSQEGLEKSPEEIRHLFQEKKVDLSKPLVATCGSGVTACHVALGAYLCGKPDVPIYDGSWVEWYMRARPEDVISEGRGKTH

SEQ ID NO: 179 - protein, 594 aa, Homo sapiens
MVLLHVLFEHAVGYALLALKEVEEISLLQPQVEESVLNLGKFHSIVRLVAFCPFASSQVALENANAVSEGVVHEDLRLLLETHLPSKKKKVLLGVGDPKIGAAIQEELGYNCQTGGVIAEILRGVRLHFHNLVKGLTDLSACKAQLGLGHSYSRAKVKFNVNRVDNMIIQSISLLDQLDKDINTFSMRVREWYGYHFPELVKIINDNATYCRLAQFIGNRRELNEDKLEKLEELTMDGAKAKAILDASRSSMGMDISAIDLINIESFSSRVVSLSEYRQSLHTYLRSKMSQVAPSLSALIGEAVGARLIAHAGSLTNLAKYPASTVQILGAEKALFRALKTRGNTPKYGLIFHSTFIGRAAAKNKGRISRYLANKCSIASRIDCFSEVPTSVFGEKLREQVEERLSFYETGEIPRKNLDVMKEAMVQAEEAAAEITRKLEKQEKKRLKKEKKRLAALALASSENSSSTPEECEEMSEKPKKKKKQKPQEVPQENGMEDPSISFSKPKKKKSFSKEELMSSDLEETAGSTSIPKRKKSTPKEETVNDPEEAGHRSGSKKKRKFSKEEPVSSGPEEAVGKSSSKKKKKFHKASQED

SEQ ID NO: 180 - protein, 529 aa, Homo sapiens
MLVLFETSVGYAIFKVLNEKKLQEVDSLWKEFETPEKANKIVKLKHFEKFQDTAEALAAFTALMEGKINKQLKKVLKKIVKEAHEPLAVADAKLGGVIKEKLNLSCIHSPVVNELMRGIRSQMDGLIPGVEPREMAAMCLGLAHSLSRYRLKFSADKVDTMIVQAISLLDDLDKELNNYIMRCREWYGWHFPELGKIISDNLTYCKCLQKVGDRKNYASAKLSELLPEEVEAEVKAAAEISMGTEVSEEDICNILHLCTQVIEISEYRTQLYEYLQNRMMAIAPNVTVMVGELVGARLIAHAGSLLNLAKHAASTVQILGAEKALFRALKSRRDTPKYGLIYHASLVGQTSPKHKGKISRMLAAKTVLAIRYDAFGEDSSSAMGVENRAKLEARLRTLEDRGIRKISGTGKALAKTEKYEHKSEVKTYDPSGDSTLPTCSKKRKIEQVDKEDEITEKKAKKAKIKVKVEEEEEEKVAEEEETSVKKKKKRGKKKHIKEEPLSEEEPCTSTAIASPEKKKKKKKKRENED

SEQ ID NO: 181 - protein, 68 aa, Homo sapiens
MVYYPELFVWVSQEPFPNKDMEGRLPKGRLPVPKEVNRKKNDETNAASLTPLGSSELRSPRISYLHFF

SEQ ID NO: 182 - protein, 659 aa, Homo sapiens
MKGRGCWDTASVRSFCSSGCLNKFKKDDSGDDDEATTPADKSELHHTLKNLSLKLDDLSTCNDLIAKHGAALQRSLTELDGLKIPSESGEKLKVVNERATLFRITSNAMINACRDFLELAEIHSRKWQRALQYEQEQRVHLEETIEQLAKQHNSLERAFHSAPGRPANPSKSFIEGSLLTPKGEDSEEDEDTEYFDAMEDSTSFITVITEAKEDSRKAEGSTGTSSVDWSSADNVLDGASLVPKGSSKVKRRVRIPNKPNYSLNLWSIMKNCIGRELSRIPMPVNFNEPLSMLQRLTEDLEYHHLLDKAVHCTSSVEQMCLVAAFSVSSYSTTVHRIAKPFNPMLGETFELDRLDDMGLRSLCEQVSHHPPSAAHYVFSKHGWSLWQEITISSKFRGKYISIMPLGAIHLEFQASGNHYVWRKSTSTVHNIIVGKLWIDQSGDIEIVNHKTNDRCQLKFLPYSYFSKEAARKVTGVVSDSQGKAHYVLSGSWDEQMECSKVMHSSPSSPSSDGKQKTVYQTLSAKLLWKKYPLPENAENMYYFSELALTLNEHEEGVAPTDSRLRPDQRLMEKGRWDEANTEKQRLEEKQRLSRRRRLEACGPGSSCSSEEAEKEADAYTPLWFEKRLDPLTGEMACVYKGGYWEAKEKQDWHMCPNIF

SEQ ID NO: 183 - protein, 349 aa, Homo sapiens
MKEDGACLFRAVADQVYGDQDMHEVVRKHCMDYLMKNADYFSNYVTEDFTTYINRKRKNNCHGNHIEMQAMAEMYNRPVEVYQYSTEPINTFHGIHQNEDEPIRVSYHRNIHYNSVVNPNKATIGVGLGLPSFKPGFAEQSLMKNAIKTSEESWIEQQMLEDKKRATDWEATNEAIEEQVARESYLQWLRDQEKQARQVRGPSQPRKASATCSSATAAASSGLEEWTSRSPRQRSSASSPEHPELHAELGMKPPSPGTVLALAKPPSPCAPGTSSQFSAGADRATSPLVSLYPALECRALIQQMSPSAFGLNDWDDDEILASVLAVSQQEYLDSMKKNKVHRDPPPDKS

SEQ ID NO: 184 - protein, 854 aa, Homo sapiens
MGMCSRQERIQKDIDVVIQKSRAEKDCLFADFRYSDSTFTFTYVGGPRSVSYSVHVSEDYPDNTYVSSSENDEDVLVTTEPIPVIFHRIATELRKTNDINCCLSIKSKLQKENGEESRQNSTVEEDSEGDNDSEEFYYGGQVNYDGELHKHPQLEADLSAVREIYGPHAVSLREYGAIDDVDIDLHIDVSFLDEEIAVAWEVIRTEPIIVRLHCSLTQYLNGPVPTVDVFQISTKERFGLGHQLKKIMQTFVTQQWKQSKEKSNCLHNKKLSEKKVKSPLHLFSTLRRSPSYPPPGCGKSKSKLKSEQDGISKTHKLLRRTCSSTVKTDDVCVTKSHRTFGRSLSSDPRAEQAMTAIKSHKLLNRPCPAAVKSEECLTLKSHRLLTRSCSGDPRCEHNTNLKPHKLLSRSYSSNLRMEELYGLKNHKLLSKSYSSAPKSSKTELFKEPNAEGRRLSLTSGLIGILTPSSSSSSQLAPNGAKCIPVRDRGFLVQTIEFAEQRIPVLNEYCVVCDEPHVFQNGPMLRPTVCERELCVFAFQTLGVMNEAADEIATGAQVVDLLVSMCRSALESPRKVVIFEPYPSVVDPNDPQMLAFNPRKKNYDRVMKALDSITSIREMTQAPYLEIKKQMDKQDPLAHPLLQWVISSNRSHIVKLPVNRQLKFMHTPHQFLLLSSPPAKESNFRAAKKLFGSTFAFHGSHIENWHSILRNGLVVASNTRLQLHGAMYGSGIYLSPMSSISFGYSGMNKKQKVSAKDEPASSSKSSNTSQSQKKGQQSQFLQSRNLKCIALCEVITSSDLHKHGEIWVVPNTDHVCTRFFFVYEDGQVGDANINTQEGGIHKEILRVIGNQTATG

SEQ ID NO: 185 - protein, 708 aa, Homo sapiens
MTERRRDELSEEINNLREKVMKQSEENNNLQSQVQKLTEENTTLREQVEPTPEDEDDDIELRGAAAAAAPPPPIEEECPEDLPEKFDGNPDMLAPFMAQCQIFMEKSTRDFSVDRVRVCFVTSMMTGRAARWASAKLERSHYLMHNYPAFMMEMKHVFEDPQRREVAKRKIRRLRQGMGSVIDYSNAFQMIAQDLDWNEPALIDQYHEGLSDHIQEELSHLEVAKSLSALIGQCIHIERRLARAAAARKPRSPPRALVLPHIASHHQVDPTEPVGGARMRLTQEEKERRRKLNLCLYCGTGGHYADNCPAKASKSSPAGKLPGPAVEGPSATGPEIIRSPQDDASSPHLQVMLQIHLPGRHTLFVRAMIDSGASGNFIDHEYVAQNGIPLRIKDWPILVEAIDGRPIASGPVVHETHDLIVDLGDHREVLSFDVTQSPFFPVVLGVRWLSTHDPNITWSTRSIVFDSEYCRYHCRMYSPIPPSLPPPAPQPPLYYPVDGYRVYQPVRYYYVQNVYTPVDEHVYPDHRLVDPHIEMIPGAHSIPSGHVYSLSEPEMAALRDFVARNVKDGLITPTIAPNGAQVLQVKRGWKLQVSYDCRAPNNFTIQNQYPRLSIPNLEDQAHLATYTEFVPQIPGYQTYPTYAAYPTYPVGFAWYPVGRDGQGRSLYVPVMITWNPHWYRQPPVPQYPPPQPPPPPPPPPPPPSYSTL

SEQ ID NO: 186 - protein, 754 aa, Homo sapiens
MGIKVQRPRCFFDIAINNQPAGRVVFELFSDVCPKTCENFRCLCTGEKGTGKSTQKPLHYKSCLFHRVVKDFMVQGGDFSEGNGRGGESIYGGFFEDESFAVKHNKEFLLSMANRGKDTNGSQFFITTKPTPHLDGHHVVFGQVISGQEVVREIENQKTDAASKPFAEVRILSCGELIPKSKVKKEEKKRHKSSSSSSSSSSDSDSSSDSQSSSDSSDSESATEEKSKKRKKKHRKNSRKHKKEKKKRKKSKKSASSESEAENLEAQPQSTVRPEEIPPIPENRFLMRKSPPKADEKERKNRERERERECNPPNSQPASYQRRLLVTRSGRKIKGRGPRRYRTPSRSRSRDRFRRSETPPHWRQEMQRAQRMRVSSGERWIKGDKSELNEIKENQRSPVRVKERKITDHRNVSESPNRKNEKEKKVKDHKSNSKERDIRRNSEKDDKYKNKVKKRAKSKSRSKSKEKSKSKERDSKHNRNEEKRMRSRSKGRDHENVKEKEKQSDSKGKDQERSRSKEKSKQLESKSNEHDHSKSKEKDRRAQSRSRECDITKGKHSYNSRTRERSRSRDRSRRVRSRTHDRDRSRSKEYHRYREQEYRRRGRSRSRERRTPPGRSRSKDRRRRRRDSRSSEREESQSRNKDKYRNQESKSSHRKENSESEKRMYSKSRDHNSSNNSREKKADRDQSPFSKIKQSSQDNELKSSMLKNKEDEKIRSSVEKENQKSKGQENDHVHEKNKKFDHESSPGTDEDKSG

SEQ ID NO: 187 - protein, 817 aa, Homo sapiens
MMKTEPRGPGGPLRSASPHRSAYEAGIQALKPPDAPGPDEAPKGAHHKKYGSNVHRIKSMFLQMGTTAGPSGEAGGGAGLAEAPRASERGVRLSLPRASSLNENVDHSALLKLGTSVSERVSRFDSKPAPSAQPAPPPHPPSRLQETRKLFERSAPAAAGGDKEAAARRLLRQERAGLQDRKLDVVVRFNGSTEALDKLDADAVSPTVSQLSAVFEKADSRTGLHRGPGLPRAAGVPQVNSKLVSKRSRVFQPPPPPPPAPSGDAPAEKERCPAGQQPPQHRVAPARPPPKPREVRKIKPVEVEESGESEAESAPGEVIQAEVTVHAALENGSTVATAASPAPEEPKAQAAPEKEAAAVAPPERGVGNGRAPDVAPEEVDESKKEDFSEADLVDVSAYSGLGEDSAGSALEEDDEDDEEDGEPPYEPESGCVEIPGLSEEEDPAPSRKIHFSTAPIQVFSTYSNEDYDRRNEDVDPMAASAEYELEKRVERLELFPVELEKDSEGLGISIIGMGAGADMGLEKLGIFVKTVTEGGAAHRDGRIQVNDLLVEVDGTSLVGVTQSFAASVLRNTKGRVRFMIGRERPGEQSEVAQLIQQTLEQERWQREMMEQRYAQYGEDDEETGEYATDEDEELSPTFPGGEMAIEVFELAENEDALSPVDMEPEKLVHKFKELQIKHAVTEAEIQQLKRKLQSLEQEKGRWRVEKAQLEQSVEENKERMEKLEGYWGEAQSLCQAVDEHLRETQAQYQALERKYSKAKRLIKDYQQKEIEFLKKETAQRRVLEESELARKEEMDKLLDKISELEGNLQTLRNSNST

SEQ ID NO: 188 - protein, 535 aa, Homo sapiens
MLLPLLLLLPMCWAVEVKRPRGVSLTNHHFYDESKPFTCLDGSATIPFDQVNDDYCDCKDGSDEPGTAACPNGSFHCTNTGYKPLYIPSNRVNDGVCDCCDGTDEYNSGVICENTCKEKGRKERESLQQMAEVTREGFRLKKILIEDWKKAREEKQKKLIELQAGKKSLEDQVEMLRTVKEEAEKPEREAKEQHQKLWEEQLAAAKAQQEQELAADAFKELDDDMDGTVSVTELQTHPELDTDGDGALSEAEAQALLSGDTQTDATSFYDRVWAAIRDKYRSEALPTDLPAPSAPDLTEPKEEQPPVPSSPTEEEEEEEEEEEEEAEEEEEEEDSEVQGEQPKEAPPPLSPPQPASPAEEDKMPPYDEQTQAFIDAAQEARNKFEEAERSLKDMEESIRNLEQEISFDFGPNGEFAYLYSQCYELTTNEYVYRLCPFKLVSQKPKLGGSPTSLGTWGSWIGPDHDKFSAMKYEQGTGCWQGPNRSTTVRLLCGKETMVTSTTEPSRCEYLMELMTPAACPEPPPEAPTEDDHDEL

SEQ ID NO: 189 - protein, 843 aa, Homo sapiens
MAKPLTDSEKRKQISVRGLAGLGDVAEVRKSFNRHLHFTLVKDRNVATPRDYFFALAHTVRDHLVGRWIRTQQHYYERDPKRIYYLSLEFYMGRTLQNTMVNLGLQNACDEAIYQLGLDLEELEEIEEDAGLGNGGLGRLAACFLDSMATLGLAAYGYGIRYEFGIFNQKIVNGWQVEEADDWLRYGNPWEKARPEYMLPVHFYGRVEHTPDGVKWLDTQVVLAMPYDTPVPGYKNNTVNTMRLWSAKAPNDFKLQDFNVGDYIEAVLDRNLAENISRVLYPNDNFFEGKELRLKQEYFVVAATLQDIIRRFKSSKFGCRDPVRTCFETFPDKVAIQLNDTHPALSIPELMRILVDVEKVDWDKAWEITKKTCAYTNHTVLPEALERWPVSMFEKLLPRHLEIIYAINQRHLDHVAALFPGDVDRLRRMSVIEEGDCKRINMAHLCVIGSHAVNGVARIHSEIVKQSVFKDFYELEPEKFQNKTNGITPRRWLLLCNPGLADTIVEKIGEEFLTDLSQLKKLLPLVSDEVFIRDVAKVKQENKLKFSAFLEKEYKVKINPSSMFDVHVKRIHEYKRQLLNCLHVVTLYNRIKRDPAKAFVPRTVMIGGKAAPGYHMAKLIIKLVTSIGDVVNHDPVVGDRLKVIFLENYRVSLAEKVIPAADLSQQISTAGTEASGTGNMKFMLNGALTIGTMDGANVEMAEEAGAENLFIFGLRVEDVEALDRKGYNAREYYDHLPELKQAVDQISSGFFSPKEPDCFKDIVNMLMHHDRFKVFADYEAYMQCQAQVDQLYRNPKEWTKKVIRNIACSGKFSSDRTITEYAREIWGVEPSDLQIPPPNIPRD

SEQ ID NO: 190 - protein, 363 aa, Homo sapiens
MWATCCNWFCLDGQPEEVPPPQGARMQAYSNPGYSSFPSPTGLEPSCKSCGAHFANTARKQTCLDCKKNFCMTCSSQVGNGPRLCLLCQRFRATAFQREELMKMKVKDLRDYLSLHDISTEMCREKEELVLLVLGQQPVISQEDRTRASTLSPDFPEQQAFLTQPHSSMVPPTSPNLPSSSAQATSVPPAQVQENQQANGHVSQDQEEPVYLESVARVPAEDETQSIDSEDSFVPGRRASLSDLTDLEDIEGLTVRQLKEILARNFVNYKGCCEKWELMERVTRLYKDQKGLQHLVSGAEDQNGGAVPSGLEENLCKICMDSPIDCVLLECGHMVTCTKCGKRMNECPICRQYVIRAVHVFRS

SEQ ID NO: 191 - protein, 485 aa, Homo sapiens
MGEPGFFVTGDRAGGRSWCLRRVGMSAGWLLLEDGCEVTVGRGFGVTYQLVSKICPLMISRNHCVLKQNPEGQWTIMDNKSLNGVWLNRARLEPLRVYSIHQGDYIQLGVPLENKENAEYEYEVTEEDWETIYPCLSPKNDQMIEKNKELRTKRKFSLDELAGPGAEGPSNLKSKINKVSCESGQPVKSQGKGEVASTPSDNLDPKLTALEPSKTTGAPIYPGFPKVTEVHHEQKASNSSASQRSLQMFKVTMSRILRLKIQMQEKHEAVMNVKKQTQKGNSKKVVQMEQELQDLQSQLCAEQAQQQARVEQLEKTFQEEEQHLQGLEIAQGEKDLKQQLAQALQEHWALMEELNRSKKDFEAIIQAKNKELEQTKEEKEKMQAQKEEVLSHMNDVLENELQCIICSEYFIEAVTLNCAHSFCSYCINEWMKRKIECPICRKDIKSKTYSLVLDNCINKMVNNLSSEVKERRIVLIRERKAKRLF

SEQ ID NO: 192 - protein, 1551 aa, Homo sapiens
MIAEPAHFYLFGLICLCSGSRLRQEDFPPRIVEHPSDLIVSKGEPATLNCKAEGRPTPTIEWYKGGERVETDKDDPRSHRMLLPSGSLFFLRIVHGRKSRPDEGVYVCVARNYLGEAVSHNASLEVAILRDDFRQNPSDVMVAVGEPAVMECQPPRGHPEPTISWKKDGSPLDDKDERITIRGGKLMITYTRKSDAGKYVCVGTNMVGERESEVAELTVLERPSFVKRPSNLAVTVDDSAEFKCEARGDPVPTVRWRKDDGELPKSRYEIRDDHTLKIRKVTAGDMGSYTCVAENMVGKAEASATLTVQVGSEPPHFVVKPRDQVVALGRTVTFQCEATGNPQPAIFWRREGSQNLLFSYQPPQSSSRFSVSQTGDLTITNVQRSDVGYYICQTLNVAGSIITKAYLEVTDVIADRPPPVIRQGPVNQTVAVDGTFVLSCVATGSPVPTILWRKDGVLVSTQDSRIKQLENGVLQIRYAKLGDTGRYTCIASTPSGEATWSAYIEVQEFGVPVQPPRPTDPNLIPSAPSKPEVTDVSRNTVTLSWQPNLNSGATPTSYIIEAFSHASGSSWQTVAENVKTETSAIKGLKPNAIYLFLVRAANAYGISDPSQISDPVKTQDVLPTSQGVDHKQVQRELGNAVLHLHNPTVLSSSSIEVHWTVDQQSQYIQGYKILYRPSGANHGESDWLVFEVRTPAKNSVVIPDLRKGVNYEIKARPFFNEFQGADSEIKFAKTLEEAPSAPPQGVTVSKNDGNGTAILVSWQPPPEDTQNGMVQEYKVWCLGNETRYHINKTVDGSTFSVVIPFLVPGIRYSVEVAASTGAGSGVKSEPQFIQLDAHGNPVSPEDQVSLAQQISDVVKQPAFIAGIGAACWIILMVFSIWLYRHRKKRNGLTSTYAGIRKVTYQRGGEAVSSGGRPGLLNISEPAAQPWLADTWPNTGNNHNDCSISCCTAGNGNSDSNLTTYSRPGQPTPYATTQLIQSNLSNNMNNGSGDSGEKHWKPLGQQKQEVAPVQYNIVEQNKLNKDYRANDTVPPTIPYNQSYDQNTGGSYNSSDRGSSTSGSQGHKKGARTPKVPKQGGMNWADLLPPPPAHPPPHSNSEEYNISVDESYDQEMPCPVPPARMYLQQDELEEEEDERGPTPPVRGAASSPAAVSYSHQSTATLTPSPQEELQPMLQDCPEETGHMQHQPDRRRQPVSPPPPPRPISPPHTYGYISGPLVSDMDTDAPEEEEDEADMEVAKMQTRRLLLRGLEQTPASSVGDLESSVTGSMINGWGSASEEDNISSGRSSVSSSDGSFFTDADFAQAVAAAAEYAGLKVARRQMQDAAGRRHFHASQCPRPTSPVSTDSNMSAAVMQKTRPAKKLKHQPGHLRRETYTDDLPPPPVPPPAIKSPTAQSKTQLEVRPVVVPKLPSMDARTDRSSDRKGSSYKGREVLDGRQVVDMRTNPGDPREAQEQQNDGKGRGNKAAKRDLPPAKTHLIQEDILPYCRPTFPTSNNPRDPSSSSSMSSRGSGSRQREQANVGRRNIAEMQVLGGYERGEDNNEELEETES

SEQ ID NO: 193 - protein, 792 aa, Homo sapiens
MHVIKRDGRQERVMFDKITSRIQKLCYGLNMDFVDPAQITMKVIQGLYSGVTTVELDTLAAETAATLTTKHPDYAILAARIAVSNLHKETKKVFSDVMEDLYNYINPHNGKHSPMVAKSTLDIVLANKDRLNSAIIYDRDFSYNYFGFKTLERSYLLKINGKVAERPQHMLMRVSVGIHKEDIDAAIETYNLLSERWFTHASPTLFNAGTNRPQLSSCFLLSMKDDSIEGIYDTLKQCALISKSAGGIGVAVSCIRATGSYIAGTNGNSNGLVPMLRVYNNTARYVDQGGNKRPGAFAIYLEPWHLDIFEFLDLKKNTGKEEQRARDLFFALWIPDLFMKRVETNQDWSLMCPNECPGLDEVWGEEFEKLYASYEKQGRVRKVVKAQQLWYAIIESQTETGTPYMLYKDSCNRKSNQQNLGTIKCSNLCTEIVEYTSKDEVAVCNLASLALNMYVTSEHTYDFKKLAEVTKVVVRNLNKIIDINYYPVPEACLSNKRHRPIGIGVQGLADAFILMRYPFESAEAQLLNKQIFETIYYGALEASCDLAKEQGPYETYEGSPVSKGILQYDMWNVTPTDLWDWKVLKEKIAKYGIRNSLLIAPMPTASTAQILGNNESIEPYTSNIYTRRVLSGEFQIVNPHLLKDLTERGLWHEEMKNQIIACNGSIQSIPEIPDDLKQLYKTVWEISQKTVLKMAAERGAFIDQSQSLNIHIAEPNYGKLTSMHFYGWKQGLKTGMYYLRTRPAANPIQFTLNKEKLKDKEKVSKEEEEKERNTAAMVCSLENRDECLMCGS

SEQ ID NO: 194 - protein, 1279 aa, Homo sapiens
MTLTERLREKISRAFYNHGLLCASYPIPIILFTGFCILACCYPLLKLPLPGTGPVEFTTPVKDYSPPPVDSDRKQGEPTEQPEWYVGAPVAYVQQIFVKSSVFPWHKNLLAVDVFRSPLSRAFQLVEEIRNHVLRDSSGIRSLEELCLQVTDLLPGLRKLRNLLPEHGCLLLSPGNFWQNDWERFHADPDIIGTIHQHEPKTLQTSATLKDLLFGVPGKYSGVSLYTRKRMVSYTITLVFQHYHAKFLGSLRARLMLLHPSPNCSLRAESLVHVHFKEEIGVAELIPLVTTYIILFAYIYFSTRKIDMVKSKWGLALAAVVTVLSSLLMSVGLCTLFGLTPTLNGGEIFPYLVVVIGLENVLVLTKSVVSTPVDLEVKLRIAQGLSSESWSIMKNMATELGIILIGYFTLVPAIQEFCLFAVVGLVSDFFLQMLFFTTVLSIDIRRMELADLNKRLPPEACLPSAKPVGQPTRYERQLAVRPSTPHTITLQPSSFRNLRLPKRLRVVYFLARTRLAQRLIMAGTVVWIGILVYTDPAGLRNYLAAQVTEQSPLGEGALAPMPVPSGMLPPSHPDPAFSIFPPDAPKLPENQTSPGESPERGGPAEVVHDSPVPEVTWGPEDEELWRKLSFRHWPTLFSYYNITLAKRYISLLPVIPVTLRLNPREALEGRHPQDGRSAWPPPGPIPAGHWEAGPKGPGGVQAHGDVTLYKVAALGLATGIVLVLLLLCLYRVLCPRNYGQLGGGPGRRRRGELPCDDYGYAPPETEIVPLVLRGHLMDIECLASDGMLLVSCCLAGHVCVWDAQTGDCLTRIPRPGRQRRDSGVGSGLEAQESWERLSDGGKAGPEEPGDSPPLRHRPRGPPPPSLFGDQPDLTCLIDTNFSAQPRSSQPTQPEPRHRAVCGRSRDSPGYDFSCLVQRVYQEEGLAAVCTPALRPPSPGPVLSQAPEDEGGSPEKGSPSLAWAPSAEGSIWSLELQGNLIVVGRSSGRLEVWDAIEGVLCCSSEEVSSGITALVFLDKRIVAARLNGSLDFFSLETHTALSPLQFRGTPGRGSSPASPVYSSSDTVACHLTHTVPCAHQKPITALKAAAGRLVTGSQDHTLRVFRLEDSCCLFTLQGHSGAITTVYIDQTMVLASGGQDGAICLWDVLTGSRVSHVFAHRGDVTSLTCTTSCVISSGLDDLISIWDRSTGIKFYSIQQDLGCGASLGVISDNLLVTGGQGCVSFWDLNYGDLLQTVYLGKNSEAQPARQILVLDNAAIVCNFGSELSLVYVPSVLEKLD

SEQ ID NO: 195 - protein, 550 aa, Homo sapiens
MPTEENIDRMCQDLRNQLYESYYLNFISAISRSKLEDIANAALAASAVTQVAKVFDQYLNFITLEDDMFVLCNQNKELVSYRAINRPDITDTEMETVMDTIVDSLFCFFVTLGAVPIIRCSRGTAAEMVAVKLDKKLRENLRDARNSLFTGDTLGAGQFSFQRPLLVLVDRNIDLATPLHHTWTYQALVHDVLDFHLNRVNLEESSGVENSPAGARPKRKNKKSYDLTPVDKFWQKHKGSPFPEVAESVQQELESYRAQEDEVKRLKSIMGLEGEDEGAISMLSDNTAKLTSAVSSLPELLEKKRLIDLHTNVATAVLEHIKARKLDVYFEYEEKIMSKTTLDKSLLDIISDPDAGTPEDKMRLFLIYYISTQQAPSEADLEQYKKALTDAGCNLNPLQYIKQWKAFTKMASAPASYGSTTTKPMGLLSRVMNTGSQFVMEGVKNLVLKQQNLPVTRILDNLMEMKSNPETDDYRYFDPKMLRGNDSSVPRNKNPFQEAIVFVVGGGNYIEYQNLVDYIKGKQGKHILYGCSELFNATQFIKQLSQLGQK

SEQ ID NO: 196 - protein, 310 aa, Homo sapiens
MRRAALWLWLCALALSLQPALPQIVATNLPPEDQDGSGDDSDNFSGSGAGALQDITLSQQTPSTWKDTQLLTAIPTSPEPTGLEATAASTSTLPAGEGPKEGEAVVLPEVEPGLTAREQEATPRPRETTQLPTTHQASTTTATTAQEPATSHPHRDMQPGHHETSTPAGPSQADLHTPHTEDGGPSATERAAEDGASSQLPAAEGSGEQDFTFETSGENTAVVAVEPDRRNQSPVDQGATGASQGLLDRKEVLGGVIAGGLVGLIFAVCLVGFMLYRMKKKDEGSYSLEEPKQANGGAYQKPTKQEEFYA

SEQ ID NO: 197 - protein, 767 aa, Homo sapiens
MATYLEFIQQNEERDGVRFSWNVWPSSRLEATRMVVPLACLLTPLKERPDLPPVQYEPVLCSRPTCKAVLNPLCQVDYRAKLWACNFCFQRNQFPPAYGGISEVNQPAELMPQFSTIEYVIQRGAQSPLIFLYVVDTCLEEDDLQALKESLQMSLSLLPPDALVGLITFGRMVQVHELSCEGISKSYVFRGTKDLTAKQIQDMLGLTKPAMPMQQARPAQPQEHPFASSRFLQPVHKIDMNLTDLLGELQRDPWPVTQGKRPLRSTGVALSIAVGLLEGTFPNTGARIMLFTGGPPTQGPGMVVGDELKIPIRSWHDIEKDNARFMKKATKHYEMLANRTAANGHCIDIYACALDQTGLLEMKCCANLTGGYMVMGDSFNTSLFKQTFQRIFTKDFNGDFRMAFGATLDVKTSRELKIAGAIGPCVSLNVKGPCVSENELGVGGTSQWKICGLDPTSTLGIYFEVVNQHNTPIPQGGRGAIQFVTHYQHSSTQRRIRVTTIARNWADVQSQLRHIEAAFDQEAAAVLMARLGVFRAESEEGPDVLRWLDRQLIRLCQKFGQYNKEDPTSFRLSDSFSLYPQFMFHLRRSPFLQVFNNSPDESSYYRHHFARQDLTQSLIMIQPILYSYSFHGPPEPVLLDSSSILADRILLMDTFFQIVIYLGETIAQWRKAGYQDMPEYENFKHLLQAPLDDAQEILQARFPMPRYINTEHGGSQARFLLSKVNPSQTHNNLYAWGQETGAPILTDDVSLQVFMDHLKKLAVSSAC

SEQ ID NO: 198 - protein, 311 aa, Homo sapiens
MPAPRAPRALAAAAPASGKAKLTHPGKAILAGGLAGGIEICITFPTEYVKTQLQLDERSHPPRYRGIGDCVRQTVRSHGVLGLYRGLSSLLYGSIPKAAVRFGMFEFLSNHMRDAQGRLDSTRGLLCGLGAGVAEAVVVVCPMETIKVKFIHDQTSPNPKYRGFFHGVREIVREQGLKGTYQGLTATVLKQGSNQAIRFFVMTSLRNWYRGDNPNKPMNPLITGVFGAIAGAASVFGNTPLDVIKTRMQGLEAHKYRNTWDCGLQILKKEGLKAFYKGTVPRLGRVCLDVAIVFVIYDEVVKLLNKVWKTD

SEQ ID NO: 199 - protein, 1117 aa, Homo sapiens
MKKASRSVGSVPKVSAISKTQTAEKIKPENSSSASTGGKLVKPGTAASLSKTKSSDDLLAGMAGGVTVTNGVKGKKSTCPSAAPSASAPAMTTVENKSKISTGTASSTKRSTSTGNKESSSTRERLRERTRLNQSKKLPSAGQGANDMALAKRSRSRTATECDVRMSKSKSDNQISDRAALEAKVKDLLTLAKTKDVEILHLRNELRDMRAQLGINEDHSEGDEKSEKETIMAHQPTDVESTLLQLQEQNTAIREELNQLKNENRMLKDRLNALGFSLEQRLDNSEKLFGYQSLSPEITPGNQSDGGGTLTSSVEGSAPGSVEDLLSQDENTLMDHQHSNSMDNLDSECSEVYQPLTSSDDALDAPSSSESEGIPSIERSRKGSSGNASEVSVACLTERIHQMEENQHSTSEELQATLQELADLQQITQELNSENERLGEEKVILMESLCQQSDKLEHFSRQIEYFRSLLDEHHISYVIDEDVKSGRYMELEQRYMDLAENARFEREQLLGVQQHLSNTLKMAEQDNKEAQEMIGALKERSHHMERIIESEQKGKAALAATLEEYKATVASDQIEMNRLKAQLENEKQKVAELYSIHNSGDKSDIQDLLESVRLDKEKAETLASSLQEDLAHTRNDANRLQDAIAKVEDEYRAFQEEAKKQIEDLNMTLEKLRSDLDEKETERSDMKETIFELEDEVEQHRAVKLHDNLIISDLENTVKKLQDQKHDMEREIKTLHRRLREESAEWRQFQADLQTAVVIANDIKSEAQEEIGDLKRRLHEAQEKNEKLTKELEEIKSRKQEEERGRVYNYMNAVERDLAALRQGMGLSRRSSTSSEPTPTVKTLIKSFDSASQVPNPAAAAIPRTPLSPSPMKTPPAAAVSPMQRHSISGPISTSKPLTALSDKRPNYGEIPVQEHLLRTSSASRPASLPRVPAMESAKTLSVSRRSSEEMKRDISAQEGASPASLMAMGTTSPQLSLSSSPTASVTPTTRSRIREERKDPLSALAREYGGSKRNALLKWCQKKTEGYQNIDITNFSSSWNDGLAFCALLHTYLPAHIPYQELNSQDKRRNFMLAFQAAESVGIKSTLDINEMVRTERPDWQNVMLYVTAIYKYFET

SEQ ID NO: 200 - protein, 341 aa, Homo sapiens
MYGKGKSNSSAVPSDSQAREKLALYVYEYLLHVGAQKSAQTFLSEIRWEKNITLGEPPGFLHSWWCVFWDLYCAAPERRETCEHSSEAKAFHDYSAAAAPSPVLGNIPPGDGMPVGPVPPGFFQALGGVPGSQPLLPSGMDPTRQQGHPNMGGPMQRMTPPRGMVPLGPQNYGGAMRPPLNALGGPGMPGMNMGPGGGRPWPNPTNANSIPYSSASPGNYVGPPGGGGPPGTPIMPSPADSTNSGDNMYTLMNAVPPGPNRPNFPMGPGSDGPMGGLGGMESHHMNGSLGSGDMDSISKNSPNNMSLSNQPGTPRDDGEMGGNFLNPFQSESYSPSMTMSV

SEQ ID NO: 201 - protein, 103 aa, Homo sapiens
MSEEKPKEGVKTENDHINLKVAGQDGSVVQFKIKRHTPLSKLMKAYCERQGLSMRQIRFRFDGQPINETDTPAQLEMEDEDTIDVFQQQTGGVPESSLAGHSF

SEQ ID NO: 202 - protein, 498 aa, Homo sapiens
MALPTLPSYWCSQQRLNQQLARQREQEARLRQQWEQNSRYFRMSDICSSKQAEWSSKTSYQRSMHAYQREKMKEEKRRSLEARREKLRQLMQEEQDLLARELEELRLSMNLQERRIREQHGKLKSAKEEQRKLIAEQLLYEHWKKNNPKLREMELDLHQKHVVNSWEMQKEEKKQQEATAEQENKRYENEYERARREALERMKAEEERRQLEDKLQAEALLQQMEELKLKEVEATKLKKEQENLLKQRWELERLEEERKQMEAFRQKAELGRFLRHQYNAQLSRRTQQIQEELEADRRILQALLEKEDESQRLHLARREQVMADVAWMKQAIEEQLQLERAREAELQMLLREEAKEMWEKREAEWARERSARDRLMSEVLTGRQQQIQEKIEQNRRAQEESLKHREQLIRNLEEVRELARREKEESEKLKSARKQELEAQVAERRLQAWEADQQEEEEEEEARRVEQLSDALLQQEAETMAEQGYRPKPYGHPKIAWN

SEQ ID NO: 203 - protein, 145 aa, Homo sapiens
MVGRNSAIAAGVCGALFIGYCIYFDRKRRSDPNFKNRLRERRKKQKLAKERAGLSKLPDLKDAEAVQKFFLEEIQLGEELLAQGEYEKGVDHLTNAIAVCGQPQQLLQVLQQTLPPPVFQMLLTKLPTISQRIVSAQSLAEDDVE

SEQ ID NO: 204 - protein, 259 aa, Homo sapiens
MAASRLELNLVRLLSRCEAMAAEKRDPDEWRLEKYVGALEDMLQALKVHASKPASEVINEYSWKVDFLKGMLQAEKLTSSSEKALANQFLAPGRVPTTARERVPATKTVHLQSRARYTSEMRSELLGTDSAEPEMDVRKRTGVAGSQPVSEKQSAAELDLVLQRHQNLQEKLAEEMLGLARSLKTNTLAAQSVIKKDNQTLSHSLKMADQNLEKLKTESERLEQHTQKSVNWLLWAMLIIVCFIFISMILFIRIMPKLK

SEQ ID NO: 205 - protein, 536 aa, Homo sapiens
MATRAQPGPLSQAGSAGVAALATVGVASGPGPGRPGPLQDETLGVASVPSQWRAVQGIRWETKSCQTASIATASASAQARNHVDAQVQTEAPVPVSVQPPSQYDIPRLAAFLRRVEAMVIRELNKNWQSHAFDGFEVNWTEQQQMVSCLYTLGYPPAQAQGLHVTSISWNSTGSVVACAYGRLDHGDWSTLKSFVCAWNLDRRDLRPQQPSAVVEVPSAVLCLAFHPTQPSHVAGGLYSGEVLVWDLSRLEDPLLWRTGLTDDTHTDPVSQVVWLPEPGHSHRFQVLSVATDGKVLLWQGIGVGQLQLTEGFALVMQQLPRSTKLKKHPRGETEVGATAVAFSSFDPRLFILGTEGGFPLKCSLAAGEAALTRMPSSVPLRAPAQFTFSPHGGPIYSVSCSPFHRNLFLSAGTDGHVHLYSMLQAPPLTSLQLSLKYLFAVRWSPVRPLVFAAASGKGDVQLFDLQKSSQKPTVLIKQTQDESPVYCLEFNSQQTQLLAAGDAQGTVKVWQLSTEFTEQGPREAEDLDCLAAEVAA

SEQ ID NO: 206 - protein, 824 aa, Homo sapiens
MASESDTEEFYDAPEDVHLGGGYPVGSPGKVGLSTFKIIESIIEESQKVLQLEDDSLDSKGKELSDQATASPIVARTDLSNIPGLLAIDQVLPEESQKAESQNTFEETELELKKCFPSDETCEKPVDETTKLTQTSSTEQLNVLETETEVLNKEAVEVKGGGDVLEPVSSDSLSTKDFAAVEEVAPAKPPRHLTPEPDIVASTKKPVPARPPPPTNFPPPRPPPPSRPAPPPRKRKSELEFETLKTPDIDVPKENITSDSLLTASMASESTVKDSQPSLDLASATSGDKIVTAQENGKAPDGQTVAGEVMGPQRPRSNSGRELTDEEILASVMIKNLDTGEEIPLSLAEEKLPTGINPLTLHIMRRTKEYVSNDAAQSDDEEKLQSQPTDTDGGRLKQKTTQLKKFLGKSVKRAKHLAEEYGERAINKVKSVRDEVFHTDQDDPSSSDDEGMPYTRPVKFKAAHGFKGPYDFDQIKVVQDLSGEHMGAVWTMKFSHCGRLLASAGQDNVVRIWALKNAFDYFNNMRMKYNTEGRVSPSPSQESLSSSKSDTDTGVCSGTDEDPDDKNAPFRQRPFCKYKGHTADLLDLSWSKNYFLLSSSMDKTVRLWHISRRECLCCFQHIDFVTAIAFHPRHLKYHTQIHVRSTRGRNKVGRKITGIEPLPGENKILVTSNDSRIRLYDLRDLSLSMKYKGYVNSSSQIKASFSHDFTYLVSGSEDKYVYIWSTYHDLSKFTSVRRDRNDFWEGIKAHNAVVTSAIFAPNPSLMLSLDVQSEKSEGNEKSEDAEVLDATPSGIMKTDNTEVLLSADFTGAIKVFVNKRKNVS

SEQ ID NO: 207 - protein, 2723 aa, Homo sapiens
MADEEAEQERLSCGEGGCVAELQRLGERLQELELQLRESRVPAVEAATDYCQQLCQTLLEYAEKWKTSEDPLPLLEVYTVAIQSYVKARPYLTSECENVALVLERLALSCVELLLCLPVELSDKQWEQFQTLVQVAHEKLMENGSCELHFLATLAQETGVWKNPVLCTILSQEPLDKDKVNEFLAFEGPILLDMRIKHLIKTNQLSQATALAKLCSDHPEIGIKGSFKQTYLVCLCTSSPNGKLIEEISEVDCKDALEMICNLESEGDEKSALVLCTAFLSRQLQQGDMYCAWELTLFWSKLQQRVEPSIQVYLERCRQLSLLTKTVYHIFFLIKVINSETEGAGLATCIELCVKALRLESTENTEVKISICKTISCLLPDDLEVKRACQLSEFLIEPTVDAYYAVEMLYNQPDQKYDEENLPIPNSLRCELLLVLKTQWPFDPEFWDWKTLKRQCLALMGEEASIVSSIDELNDSEVYEKVVDYQEESKETSMNGLSGGVGANSGLLKDIGDEKQKKREIKQLRERGFISARFRNWQAYMQYCVLCDKEFLGHRIVRHAQKHYKDGIYSCPICAKNFNSKETFVPHVTLHVKQSSKERLAAMKPLRRLGRPPKITTTNENQKTNTVAKQEQRPIKKNSLYSTDFIVFNDNDGSDDENDDKDKSYEPEVIPVQKPVPVNEFNCPVTFCKKGFKYFKNLIAHVKGHKDNEDAKRFLEMQSKKVICQYCRRHFVSVTHLNDHLQMHCGSKPYICIQMKCKAGFNSYAELLTHRKEHQVFRAKCMFPKCGRIFSEAYLLYDHEAQHYNTYTCKFTGCGKVYRSQGELEKHLDDHSTPPEKVLPPEAQLNSSGDSIQPSEVNQNTAENIEKERSMLPSENNIENSLLADRSDAWDKSKAESAVTKQDQISASELRQANGPLSNGLENPATTPLLQSSEVAVSIKVSLNQGIEDNFGKQENSTVEGSGEALVTDLHTPVEDTCNDLCHPGFQERKEQDCFNDAHVTQNSLVNSETLKIGDLTPQNLERQVNNLMTFSVQNQAAFQNNLPTSKFECGDNVKTSSNLYNLPLKTLESIAFVPPQSDLSNSLGTPSVPPKAPVQKFSCQVEGCTRTYNSSQSIGKHMKTAHPDQYAAFKMQRKSKKGQKANNLNTPNNGKFVYFLPSPVNSSNPFFTSQTKANGNPACSAQLQHVSPPIFPAHLASVSTPLLSSMESVINPNITSQDKNEQGGMLCSQMENLPSTALPAQMEDLTKTVLPLNIDSGSDPFLPLPAESSSMSLFPSPADSGTNSVFSQLENNTNHYSSQIEGNTNSSFLKGGNGENAVFPSQVNVANNFSSTNAQQSAPEKVKKDRGRGPNGKERKPKHNKRAKWPAIIRDGKFICSRCYRAFTNPRSLGGHLSKRSYCKPLDGAEIAQELLQSNGQPSLLASMILSTNAVNLQQPQQSTFNPEACFKDPSFLQLLAENRSPAFLPNTFPRSGVTNFNTSVSQEGSEIIKQALETAGIPSTFEGAEMLSHVSTGCVSDASQVNATVMPNPTVPPLLHTVCHPNTLLTNQNRTSNSKTSSIEECSSLPVFPTNDLLLKTVENGLCSSSFPNSGGPSQNFTSNSSRVSVISGPQNTRSSHLNKKGNSASKRRKKVAPPLIAPNASQNLVTSDLTTMGLIAKSVEIPTTNLHSNVIPTCEPQSLVENLTQKLNNVNNQLFMTDVKENFKTSLESHTVLAPLTLKTENGDSQMMALNSCTTSINSDLQISEDNVIQNFEKTLEIIKTAMNSQILEVKSGSQGAGETSQNAQINYNIQLPSVNTVQNNKLPDSSPFSSFISVMPTKSNIPQSEVSHKEDQIQEILEGLQKLKLENDLSTPASQCVLINTSVTLTPTPVKSTADITVIQPVSEMINIQFNDKVNKPFVCQNQGCNYSAMTKDALFKHYGKIHQYTPEMILEIKKNQLKFAPFKCVVPTCTKTFTRNSNLRAHCQLVHHFTTEEMVKLKIKRPYGRKSQSENVPASRSTQVKKQLAMTEENKKESQPALELRAETQNTHSNVAVIPEKQLVEKKSPDKTESSLQVITVTSEQCNTNALTNTQTKGRKIRRHKKEKEEKKRKKPVSQSLEFPTRYSPYRPYRCVHQGCFAAFTIQQNLILHYQAVHKSDLPAFSAEVEEESEAGKESEETETKQTLKEFRCQVSDCSRIFQAITGLIQHYMKLHEMTPEEIESMTASVDVGKFPCDQLECKSSFTTYLNYVVHLEADHGIGLRASKTEEDGVYKCDCEGCDRIYATRSNLLRHIFNKHNDKHKAHLIRPRRLTPGQENMSSKANQEKSKSKHRGTKHSRCGKEGIKMPKTKRKKKNNLENKNAKIVQIEENKPYSLKRGKHVYSIKARNDALSECTSRFVTQYPCMIKGCTSVVTSESNIIRHYKCHKLSKAFTSQHRNLLIVFKRCCNSQVKETSEQEGAKNDVKDSDTCVSESNDNSRTTATVSQKEVEKNEKDEMDELTELFITKLINEDSTSVETQANTSSNVSNDFQEDNLCQSERQKASNLKRVNKEKNVSQNKKRKVEKAEPASAAELSSVRKEEETAVAIQTIEEHPASFDWSSFKPMGFEVSFLKFLEESAVKQKKNTDKDHPNTGNKKGSHSNSRKNIDKTAVTSGNHVCPCKESETFVQFANPSQLQCSDNVKIVLDKNLKDCTELVLKQLQEMKPTVSLKKLEVHSNDPDMSVMKDISIGKATGRGQY

SEQ ID NO: 208 - protein, 69 aa, Homo sapiens [sequence omitted]

1-12. (canceled)

13. A method for managing the therapy of rheumatoid arthritis patients undergoing drug-based therapy, wherein responders and/or non-responders to the drug-based therapy are identified by an in-vitro diagnosis, characterised in that at least one marker sequence is selected from the group of SEQ ID NO: 1-208.

14. The method of claim 13, wherein patients resistant to the drug-based therapy are identified by an in-vitro diagnosis, characterised in that at least one marker sequence is selected from the group of SEQ ID NO: 1-3 and/or 105-107, SEQ ID NO: 4-51 and/or 108-155, SEQ ID NO: 52-104 and/or 156-208.

15. The method of claim 13, wherein the drug-based therapy comprises the drug methotrexate, azathioprine, sulfasalazine, chloroquine/hydroxychloroquine, leflunomide, cyclophosphamide, D-penicillamine or cyclosporine, characterised in that at least one marker sequence is selected from the group SEQ ID NO: 1-3 and/or 105-107, SEQ ID NO: 4-51 and/or 108-155.

16. The method of claim 15, wherein the drug-based therapy comprises the drug methotrexate.

17. The method of claim 13, wherein the drug-based therapy comprises the drugs constituted by monoclonal therapeutic proteins, TNF blockers, and anti-TNF blockers, characterised in that at least one marker sequence is selected from the group SEQ ID NO: 52-104 and/or 156-208.

18. The method of claim 17, characterised in that the therapy is implemented in combination with drugs selected from the group methotrexate, azathioprine, sulfasalazine, chloroquine/hydroxychloroquine, leflunomide, cyclophosphamide, D-penicillamine or cyclosporine.

19. The method of claim 18, wherein the drug-based therapy comprises the drug methotrexate.

20. The method of claim 13, comprising further clinical decisions, such as altering the therapy, aborting the therapy, changing the drug, hospitalisation.

21. The method of claim 13, wherein responders and/or non-responders to the drug-based therapy are identified by means of an in-vitro diagnosis, characterised in that up to twelve marker sequences are selected from the group SEQ ID NO: 1-208.

22. The method of claim 13, characterised in that a remission of the rheumatoid arthritis occurs.

23. The method for managing the therapy of rheumatoid arthritis patients undergoing drug-based therapy according to claim 21, wherein the marker sequences are selected from the group
PPP5C (SEQ ID NO: 43, 147), MRPL11 (SEQ ID NO: 38, 142), TRMO (SEQ ID NO: 31, 135), RAD50 (SEQ ID NO: 45, 149), ADAMTS13 (SEQ ID NO: 27, 131), DIP2C (SEQ ID NO: 33, 137), CHD4 (SEQ ID NO: 32, 136), ALAS1 (SEQ ID NO: 29, 133), ZPR1 (SEQ ID NO: 51, 155), PDRG1 (SEQ ID NO: 41, 145)
or
MED8 (SEQ ID NO: 37, 141), HNRNPAB (SEQ ID NO: 11, 115), RBM26 (SEQ ID NO: 18, 122), UBXNI1 (SEQ ID NO: 20, 124), FAM89B (SEQ ID NO: 23, 127), TTLL12 (SEQ ID NO: 19, 123), PPP1R15A (SEQ ID NO: 17, 121), GAREM (SEQ ID NO: 25, 129), KIF5A (SEQ ID NO: 12, 116), HCLS1 (SEQ ID NO: 10, 114), ZNF579 (SEQ ID NO: 22, 126),
or
NOP58 (SEQ ID NO: 76, 180), SCFD1 (SEQ ID NO: 91, 195), MPST (SEQ ID NO: 74, 178), ILKAP (SEQ ID NO: 68, 172), ROBO1 (SEQ ID NO: 88, 192), ISCU (SEQ ID NO: 69, 173), EHBP1 (SEQ ID NO: 61, 165), PPP1R9B (SEQ ID NO: 83, 187), ZNF292 (SEQ ID NO: 103, 207), TOMM20 (SEQ ID NO: 99, 203), Clorf131 (SEQ ID NO: 54, 158),
or
SPECCIL (SEQ ID NO: 95, 199), SEC23B (SEQ ID NO: 93, 197), HDHD2 (SEQ ID NO: 67, 171, CLIP1 (SEQ ID NO: 56, 160), WDR34 (SEQ ID NO: 101, 205), EIF4G2 (SEQ ID NO: 63, 167), SSBP2 (SEQ ID NO: 96, 200), SCAP (SEQ ID NO: 90, 194), PYGB (SEQ ID NO: 85, 189), DOCK6 (SEQ ID NO: 59, 163), RFFL (SEQ ID NO: 86, 190), SUMO3 (SEQ ID NO: 97, 201).

24. A panel containing at least five marker sequences selected from the group
PPP5C (SEQ ID NO: 43, 147), MRPL11 (SEQ ID NO: 38, 142), TRMO (SEQ ID NO: 31, 135), RAD50 (SEQ ID NO: 45, 149), ADAMTS13 (SEQ ID NO: 27, 131), DIP2C (SEQ ID NO: 33, 137), CHD4 (SEQ ID NO: 32, 136), ALAS1 (SEQ ID NO: 29, 133), ZPR1 (SEQ ID NO: 51, 155), PDRG1 (SEQ ID NO: 41, 145)
or
MED8 (SEQ ID NO: 37, 141), HNRNPAB (SEQ ID NO: 11, 115), RBM26 (SEQ ID NO: 18, 122), UBXN11 (SEQ ID NO: 20, 124), FAM89B (SEQ ID NO: 23, 127), TTLL12 (SEQ ID NO: 19, 123), PPPIR15A (SEQ ID NO: 17, 121), GAREM (SEQ ID NO: 25, 129), KIF5A (SEQ ID NO: 12, 116), HCLS1 (SEQ ID NO: 10, 114), ZNF579 (SEQ ID NO: 22, 126),
or
NOP58 (SEQ ID NO: 76, 180), SCFD1 (SEQ ID NO: 91, 195), MPST (SEQ ID NO: 74, 178), ILKAP (SEQ ID NO: 68, 172), ROBO1 (SEQ ID NO: 88, 192), ISCU (SEQ ID NO: 69, 173), EHBP1 (SEQ ID NO: 61, 165), PPPIR9B (SEQ ID NO: 83, 187), ZNF292 (SEQ ID NO: 103, 207), TOMM20 (SEQ ID NO: 99, 203), Clorf131 (SEQ ID NO: 54, 158),
or
SPECCIL (SEQ ID NO: 95, 199), SEC23B (SEQ ID NO: 93, 197), HDHD2 (SEQ ID NO: 67, 171, CLIP (SEQ ID NO: 56, 160), WDR34 (SEQ ID NO: 101, 205), EIF4G2 (SEQ ID NO: 63, 167), SSBP2 (SEQ ID NO: 96, 200), SCAP (SEQ ID NO: 90, 194), PYGB (SEQ ID NO: 85, 189), DOCK6 (SEQ ID NO: 59, 163), RFFL (SEQ ID NO: 86, 190), SUMO3 (SEQ ID NO: 97, 201).
